(19) United States
(12) Patent Application Publication
(10) Pub. No.: US 2022/0364067 A1
(43) Pub. Date: Nov. 17, 2022

(54) BASE EDITING ENZYMES

(71) Applicant: Metagenomi, Inc., Emeryville, CA (US)

(72) Inventors: Jyun-Liang LIN, Emeryville, CA (US); Alan BROOKS, Emeryville, CA (US); Cristina BUTTERFIELD, Emeryville, CA (US); Christopher BROWN, Emeryville, CA (US); Cindy CASTELLE, Emeryville, CA (US)

(21) Appl. No.: 17/841,082

(22) Filed: Jun. 15, 2022

Related U.S. Application Data
(63) Continuation of application No. PCT/US2021/049962, filed on Sep. 10, 2021.
(60) Provisional application No. 63/222,351, filed on Jul. 15, 2021.
(60) Provisional application No. 63/077,057, filed on Sep. 11, 2020.

(51) Int. Cl. C12N 9/22; C12N 15/11; C12N 15/90; C12N 15/85

(52) U.S. Cl. CPC C12N 9/22; C12N 15/11; C12N 15/907; C12N 15/85; C12N 2310/20; C12N 2800/80; C12N 2800/107

(57) ABSTRACT

The present disclosure provides for endonuclease enzymes having distinguishing domain features, as well as methods of using such enzymes or variants thereof.

### CROSS-REFERENCE

[0001] This application is a continuation application of International Application No. PCT/US2021/049962 filed Sep. 10, 2021, entitled “BASE EDITING ENZYMES”, which claims the benefit of U.S. Provisional Application No. 63/077,057, filed on Sep. 11, 2020, entitled “BASE EDITING ENZYMES”; and U.S. Provisional Application No. 63/222,351, filed on Jul. 15, 2021, entitled “BASE EDITING ENZYMES”, each of which is incorporated by reference in its entirety herein.

### BACKGROUND

[0002] Cas enzymes along with their associated Clustered Regularly Interspaced Short Palindromic Repeats (CRISPR) guide ribonucleic acids (RNAs) appear to be a pervasive (˜45% of bacteria, —84% of archaea) component of prokaryotic immune systems, serving to protect such microorganisms against non-self nucleic acids, such as infectious viruses and plasmids by CRISPR-RNA guided nucleic acid cleavage. While the deoxyribonucleic acid (DNA) elements encoding CRISPR RNA elements may be relatively conserved in structure and length, their CRISPR-associated (Cas) proteins are highly diverse, containing a wide variety of nucleic acid-interacting domains. While CRISPR DNA elements have been observed as early as 1987, the programmable endonuclease cleavage ability of CRISPR/Cas complexes has only been recognized relatively recently, leading to the use of recombinant CRISPR/Cas systems in diverse DNA manipulation and gene editing applications.

### Sequence Listing

[0003] The instant application contains a Sequence Listing which has been submitted electronically in ASCII format and is hereby incorporated by reference in its entirety. Said ASCII copy, created on Sep. 9, 2021, is named 55921-715_301 SL.txt and is 705,305 bytes in size.

### SUMMARY

[0004] In some aspects, the present disclosure provides for an engineered nucleic acid editing system, comprising: an endonuclease comprising a RuvC domain and an HNH domain, wherein said endonuclease is derived from an uncultivated microorganism, wherein said endonuclease is a class 2, type II Cas endonuclease, wherein said endonuclease is configured to be deficient in nuclease activity; a base editor coupled to said endonuclease; and an engineered guide ribonucleic acid structure configured to form a complex with said endonuclease comprising: a guide ribonucleic acid sequence configured to hybridize to a target deoxyribonucleic acid sequence; and a ribonucleic acid sequence configured to bind to said endonuclease. In some embodiments, said RuvC domain lacks nuclease activity. In some embodiments, said class 2, type II Cas endonuclease comprises a nickase mutation. In some embodiments, said class 2, type II cas endonuclease comprises the aspartate to alanine mutation at residue 9 relative to SEQ ID NO: 70, residue 13 relative to SEQ ID NOs: 71, 72, or 74, residue 12 relative to SEQ ID NO: 73, residue 17 relative to SEQ ID NO: 75, residue 23 relative to SEQ ID NO: 76, or residue 10 relative to SEQ ID NO: 597 when optimally aligned. In some embodiments, said endonuclease comprises an aspartate to alanine mutation at residue 9 relative to SEQ ID NO: 70, residue 13 relative to SEQ ID NO: 72, or residue 17 relative to SEQ ID NO: 75 when optimally aligned. In some embodiments, said endonuclease comprises a sequence with at least 95% sequence identity to any one of SEQ ID NOs:70-78 or 597 or a variant thereof. In some aspects, the present disclosure provides for an engineered nucleic acid editing system comprising: an endonuclease having at least 95% sequence identity to any one of SEQ ID NOs:70-78 or 597 or a variant thereof; a base editor coupled to said endonuclease; and an engineered guide ribonucleic acid structure configured to form a complex with said endonuclease comprising: a guide ribonucleic acid sequence configured to hybridize to a target deoxyribonucleic acid sequence; and a ribonucleic acid sequence configured to bind to said endonuclease. In some aspects, the present disclosure provides for an engineered nucleic acid editing system comprising: an endonuclease configured to bind to a protospacer adjacent motif (PAM) sequence comprising any one of SEQ ID NOs: 360-368 or 598 or a variant thereof, wherein said endonuclease is a class 2, type II Cas endonuclease, and wherein said endonuclease is configured to be deficient in nuclease activity; a base editor coupled to said endonuclease; and an engineered guide ribonucleic acid structure configured to form a complex with said endonuclease comprising: a guide ribonucleic acid sequence configured to hybridize to a target deoxyribonucleic acid sequence; and a ribonucleic acid sequence configured to bind to said endonuclease. In some embodiments, said endonuclease comprises a nickase mutation. In some embodiments, said endonuclease is configured to cleave one strand of a double-stranded target deoxyribonucleic acid. In some embodiments, said class 2, type II cas endonuclease comprises an aspartate to alanine mutation at residue 9 relative to SEQ ID NO: 70, residue 13 relative to SEQ ID NOs: 71, 72, or 74, residue 12 relative to SEQ ID NO: 73, residue 17 relative to SEQ ID NO: 75, residue 23 relative to SEQ ID NO: 76, or residue 10 relative to SEQ ID NO: 597 when optimally aligned. In some embodiments, said base editor comprises a sequence having at least 70%, 80%, 90% or 95% identity to any one of SEQ ID NOs: 1-51, 57-66, 385-443, 444-475, or 594-595 or a variant thereof. In some embodiments, said base editor comprises a sequence having at least 70%, 80%, 90% or 95% identity to any one of SEQ ID NOs: 50-51 or 385-390. In some embodiments, said RuvC domain lacks nuclease activity. In some embodiments, said endonuclease is derived from an uncultivated microorganism. In some embodiments, said endonuclease has less than 80% identity to a Cas9 endonuclease. In some embodiments, said endonuclease further comprises an HNH domain. In some embodiments, said engineered guide ribonucleic acid sequence comprises a sequence with at least 80% sequence identity to non-degenerate nucleotides of any one of SEQ ID NOs: 88-96 or 488-489 or a variant thereof. In some aspects, the present disclosure provides for an engineered nucleic acid editing system comprising, an engineered guide ribonucleic acid structure comprising: a guide ribonucleic acid sequence configured to hybridize to a target deoxyribonucleic acid sequence; and a ribonucleic acid sequence configured to bind to an endonuclease, wherein said engineered ribonucleic acid sequence comprises a sequence with at least 80% sequence identity to non-degenerate nucleotides of any one of SEQ ID NOs: 88-96 or 488-489 or a variant thereof; a class 2, type II Cas endonuclease configured to bind to said engineered guide ribonucleic acid; and a base editor coupled to said endonuclease. In some embodiments, said base editor comprises a sequence having at least 70%, 80%, 90% or 95% identity to any one of SEQ ID NOs: 50-51 or 385-390. In some embodiments, said endonuclease is configured to bind to a protospacer adjacent motif (PAM) sequence selected from the group consisting of SEQ ID NOs: 360-368 or 598. In some embodiments, said base editor comprises a sequence with at least 70%, 80%, 90% or 95% identity to any one of SEQ ID NOs: 1-51, 57-66, 385-443, 444-475, or 594-595 or a variant thereof. In some embodiments, said base editor is an adenine deaminase. In some embodiments, said adenosine deaminase comprises a sequence with at least 70%, 80%, 90% or 95% identity to any one of SEQ ID NOs: 50-51, 57, 385-443, 448-475, or 595 or a variant thereof. In some embodiments, said base editor is a cytosine deaminase. In some embodiments, said cytosine deaminase comprises a sequence with at least 70%, 80%, 90% or 95% identity to any one of SEQ ID NOs: 1-49, 444-447, 594, or 58-66 or a variant thereof. In some embodiments, the system further comprises a uracil DNA glycosylase inhibitor coupled to said endonuclease or said base editor. In some embodiments, said uracil DNA glycosylase inhibitor comprises a sequence with at least 70%, 80%, 90% or 95% identity to any one of SEQ ID NOs: 52-56 or SEQ ID NO: 67. In some embodiments, said engineered guide ribonucleic acid structure comprises at least two ribonucleic acid polynucleotides. In some embodiments, said engineered guide ribonucleic acid structure comprises one ribonucleic acid polynucleotide comprising said guide ribonucleic acid sequence and said tracr ribonucleic acid sequence. In some embodiments, said guide ribonucleic acid sequence is complementary to a prokaryotic, bacterial, archaeal, eukaryotic, fungal, plant, mammalian, or human genomic sequence. In some embodiments, said guide ribonucleic acid sequence is 15-24 nucleotides in length. In some embodiments, said endonuclease comprises one or more nuclear localization sequences (NLSs) proximal to an N- or C-terminus of said endonuclease. In some embodiments, said NLS comprises a sequence with at least 90% identity to a selected from SEQ ID NOs: 369-384 or a variant thereof. In some embodiments, said endonuclease is covalently coupled directly to said base editor or covalently coupled to said base editor through a linker. In some embodiments, said endonuclease comprises an aspartate to alanine mutation at residue 9 relative to SEQ ID NO: 70, residue 13 relative to SEQ ID NOs: 71, 72, or 74, residue 12 relative to SEQ ID NO: 73 or 78, residue 17 relative to SEQ ID NO: 75, residue 23 relative to SEQ ID NO: 76, residue 8 relative to SEQ ID NO: 77, or residue 10 relative to SEQ ID NO: 597 when optimally aligned. In some embodiments, said endonuclease comprises an aspartate to alanine mutation at residue 9 relative to SEQ ID NO: 70, residue 13 relative to SEQ ID NO: 72, or residue 17 relative to SEQ ID NO: 75 when optimally aligned. In some embodiments, a polypeptide comprises said endonuclease and said base editor. In some embodiments, said endonuclease is configured to cleave one strand of a double-stranded target deoxyribonucleic acid. In some embodiments, said system further comprises a source of Mg²⁺. In some embodiments: (a) said endonuclease comprises a sequence at least 70%, at least 80%, or at least 90% identical to any one of SEQ ID NOs: 70, 71, 73, 74, 76, 78, 77, or 78 or a variant thereof; (b) said guide RNA structure comprises a sequence at least 70%, at least 80%, or at least 90% identical to non-degenerate nucleotides of any one of SEQ ID NOs: 88, 89, 91, 92, 94, 96, 95, or 488; (c) said endonuclease is configured to bind to a PAM comprising any one of SEQ ID NOs: 360, 361, 363, 365, 367, or 368; or (d) said base editor comprises a sequence at least 70%, at least 80%, or at least 90% identical to SEQ ID NOs: 58 or 595 or a variant thereof. In some embodiments: (a) said endonuclease comprises a sequence at least 70%, at least 80%, or at least 90% identical to any one of SEQ ID NOs: 70, 71, or 78 or a variant thereof; (b) said guide RNA structure comprises a sequence at least 70%, at least 80%, or at least 90% identical to non-degenerate nucleotides of at least one of SEQ ID NOs: 88, 89, or 96; (c) said endonuclease is configured to bind to a PAM comprising any one of SEQ ID NOs: 360, 362, or 368; or (d) said base editor comprises a sequence at least 70%, at least 80%, or at least 90% identical to SEQ ID NO: 594 or a variant thereof. In some embodiments, said sequence identity is determined by a BLASTP, CLUSTALW, MUSCLE, MAFFT, or Smith-Waterman homology search algorithm. In some embodiments, said sequence identity is determined by said BLASTP homology search algorithm using parameters of a wordlength (W) of 3, an expectation (E) of 10, and a BLOSUM62 scoring matrix setting gap costs at existence of 11, extension of 1, and using a conditional compositional score matrix adjustment. In some embodiments, said endonuclease is configured to be catalytically dead. In some embodiments, said endonuclease is configured to cleave one strand of a double-stranded target deoxyribonucleic acid.

[0005] In some aspects, the present disclosure provides for a nucleic acid comprising an engineered nucleic acid sequence optimized for expression in an organism, wherein said nucleic acid encodes a class 2, type II Cas endonuclease coupled to a base editor, and wherein said endonuclease is derived from an uncultivated microorganism.

[0006] In some aspects, the present disclosure provides for a nucleic acid comprising an engineered nucleic acid sequence optimized for expression in an organism, wherein said nucleic acid encodes an endonuclease having at least 70% sequence identity to any one of SEQ ID NOs: 70-78 coupled to a base editor. In some embodiments, said endonuclease comprises a sequence encoding one or more nuclear localization sequences (NLSs) proximal to an N- or C-terminus of said endonuclease. In some embodiments, said NLS comprises a sequence with at least 90% identity to a selected from SEQ ID NOs: 369-384 or a variant thereof. In some embodiments, said organism is prokaryotic, bacterial, eukaryotic, fungal, plant, mammalian, rodent, or human.

[0007] In some aspects, the present disclosure provides for a vector comprising a nucleic acid sequence encoding a class 2, type II Cas endonuclease coupled to a base editor, wherein said endonuclease is derived from an uncultivated microorganism.

[0008] In some aspects, the present disclosure provides for a vector comprising the nucleic acid of any of the aspects or embodiments described herein. In some embodiments, the vector further comprises a nucleic acid encoding an engineered guide ribonucleic acid structure configured to form a complex with said endonuclease comprising: a guide ribonucleic acid sequence configured to hybridize to a target deoxyribonucleic acid sequence; and a ribonucleic acid sequence configured to binding to said endonuclease. In some embodiments, the vector is a plasmid, a minicircle, a CELiD, an adeno-associated virus (AAV) derived virion, or a lentivirus.

[0009] In some aspects, the present disclosure provides for a cell comprising the vector of any of the aspects or embodiments described herein.

[0010] In some aspects, the present disclosure provides for a method of manufacturing an endonuclease, comprising cultivating the cell of any of the aspects or embodiments described herein.

[0011] In some aspects, the present disclosure provides for a method for modifying a double-stranded deoxyribonucleic acid polynucleotide comprising contacting said double-stranded deoxyribonucleic acid polynucleotide with a complex comprising: an endonuclease comprising a RuvC domain and an HNH domain, wherein said endonuclease is derived from an uncultivated microorganism, wherein said endonuclease is a class 2, type II Cas endonuclease, and wherein the endonuclease is configured to be deficient in nuclease activity; a base editor coupled to said endonuclease; and an engineered guide ribonucleic acid structure configured to bind to said endonuclease and said double-stranded deoxyribonucleic acid polynucleotide; wherein said double-stranded deoxyribonucleic acid polynucleotide comprises a protospacer adjacent motif (PAM). In some embodiments, said endonuclease comprising a RuvC domain and an HNH domain is covalently coupled directly to said base editor or covalently coupled to said base editor through a linker. In some embodiments, said endonuclease comprising a RuvC domain and an HNH domain comprises a sequence with at least 95% sequence identity to any one of SEQ ID NOs:70-78 or 597 or a variant thereof.

[0012] In some aspects, the present disclosure provides for a method for modifying a double-stranded deoxyribonucleic acid polynucleotide, comprising contacting said double-stranded deoxyribonucleic acid polynucleotide with a complex comprising: a class 2, type II Cas endonuclease, a base editor coupled to said endonuclease, and an engineered guide ribonucleic acid structure configured to bind to said endonuclease and said double-stranded deoxyribonucleic acid polynucleotide; wherein said double-stranded deoxyribonucleic acid polynucleotide comprises a protospacer adjacent motif (PAM); and wherein said PAM comprises a sequence selected from the group consisting of SEQ ID NOs:70-78 or 597. In some embodiments, said class 2, type II Cas endonuclease is covalently coupled to said base editor or coupled to said base editor through a linker. In some embodiments, said base editor comprises a sequence with at least 70%, at least 80%, at least 90% or at least 95% identity to a sequence selected from SEQ ID NOs: 1-51, 57-66, 385-443, 444-475, or 594-595 or a variant thereof. In some embodiments, said base editor comprises an adenine deaminase; said double-stranded deoxyribonucleic acid polynucleotide comprises an adenine; and modifying said double-stranded deoxyribonucleic acid polypeptide comprises converting said adenine to guanine. In some embodiments, said adenine deaminase comprises a sequence with at least 70%, 80%, 90% or 95% sequence identity to any one of SEQ ID NOs: 50-51, 57, 385-443, 448-475, or 595 or a variant thereof. In some embodiments, said base editor comprises a cytosine deaminase; said double-stranded deoxyribonucleic acid polynucleotide comprises a cytosine; and modifying said double-stranded deoxyribonucleic acid polypeptide comprises converting said cytosine to uracil. In some embodiments, said cytosine deaminase comprises a sequence with at least 70%, 80%, 90% or 95% sequence identity to any one of SEQ ID NOs: 1-49, 444-447, 594, or 58-66 or a variant thereof. In some embodiments, said complex further comprises a uracil DNA glycosylase inhibitor coupled to said endonuclease or said base editor. In some embodiments, said uracil DNA glycosylase inhibitor comprises a sequence with at least 70%, 80%, 90% or 95% identity to any one of SEQ ID NOs: 52-56 or SEQ ID NO: 67 or a variant thereof. In some embodiments, said double-stranded deoxyribonucleic acid polynucleotide comprises a first strand comprising a sequence complementary to a sequence of said engineered guide ribonucleic acid structure and a second strand comprising said PAM. In some embodiments, said PAM is directly adjacent to the 3′ end of said sequence complementary to said sequence of said engineered guide ribonucleic acid structure. In some embodiments, said class 2, type II Cas endonuclease is not a Cas9 endonuclease, a Cas14 endonuclease, a Cas12a endonuclease, a Cas12b endonuclease, a Cas 12c endonuclease, a Cas12d endonuclease, a Cas12e endonuclease, a Cas13a endonuclease, a Cas13b endonuclease, a Cas13c endonuclease, or a Cas 13d endonuclease. In some embodiments, said class 2, type II Cas endonuclease is derived from an uncultivated microorganism. In some embodiments, said double-stranded deoxyribonucleic acid polynucleotide is a eukaryotic, plant, fungal, mammalian, rodent, or human double-stranded deoxyribonucleic acid polynucleotide.

[0013] In some aspects, the present disclosure provides for a method of modifying a target nucleic acid locus, said method comprising delivering to said target nucleic acid locus said engineered nucleic acid editing system of any of the aspects or embodiments described herein, wherein said endonuclease is configured to form a complex with said engineered guide ribonucleic acid structure, and wherein said complex is configured such that upon binding of said complex to said target nucleic acid locus, said complex modifies a nucleotide of said target nucleic locus. In some embodiments, said engineered nucleic acid editing system comprises an adenine deaminase, said nucleotide is an adenine, and modifying said target nucleic acid locus comprises converting said adenine to a guanine. In some embodiments, said engineered nucleic acid editing system comprises a cytidine deaminase and a uracil DNA glycosylase inhibitor, said nucleotide is a cytosine and modifying said target nucleic acid locus comprises converting said adenine to a uracil. In some embodiments, said target nucleic acid locus comprises genomic DNA, viral DNA, or bacterial DNA. In some embodiments, said target nucleic acid locus is in vitro. In some embodiments, said target nucleic acid locus is within a cell. In some embodiments, said cell is a prokaryotic cell, a bacterial cell, a eukaryotic cell, a fungal cell, a plant cell, an animal cell, a mammalian cell, a rodent cell, a primate cell, or a human cell. In some embodiments, said cell is within an animal. In some embodiments, said cell is within a cochlea. In some embodiments, said cell is within an embryo. In some embodiments, said embryo is a two-cell embryo. In some embodiments, said embryo is a mouse embryo. In some embodiments, delivering said engineered nucleic acid editing system to said target nucleic acid locus comprises delivering the nucleic acid of any of the aspects or embodiments described herein or the vector of any of the aspects or embodiments described herein. In some embodiments, delivering said engineered nucleic acid editing system to said target nucleic acid locus comprises delivering a nucleic acid comprising an open reading frame encoding said endonuclease. In some embodiments, said nucleic acid comprises a promoter to which said open reading frame encoding said endonuclease is operably linked. In some embodiments, delivering said engineered nucleic acid editing system to said target nucleic acid locus comprises delivering a capped mRNA containing said open reading frame encoding said endonuclease. In some embodiments, delivering said engineered nucleic acid editing system to said target nucleic acid locus comprises delivering a translated polypeptide. In some embodiments, delivering said engineered nucleic acid editing system to said target nucleic acid locus comprises delivering a deoxyribonucleic acid (DNA) encoding said engineered guide ribonucleic acid structure operably linked to a ribonucleic acid (RNA) pol III promoter.

[0014] In some aspects, the present disclosure provides for an engineered nucleic acid editing polypeptide, comprising: an endonuclease comprising a RuvC domain and an HNH domain, wherein said endonuclease is derived from an uncultivated microorganism, wherein said endonuclease is a class 2, type II Cas endonuclease, and wherein the endonuclease is configured to be deficient in nuclease activity; and a base editor coupled to said endonuclease. In some embodiments, said endonuclease comprises a sequence with at least 95% sequence identity to any one of SEQ ID NOs:70-78 or 597 or a variant thereof.

[0015] In some aspects, the present disclosure provides for an engineered nucleic acid editing polypeptide, comprising: an endonuclease having at least 80%, at least 81%, at least 82%, at least 83%, at least 84%, at least 85%, at least 86%, at least 87%, at least 88%, at least 89%, at least 90%, at least 91%, at least 92%, at least 93%, at least 94%, at least 95%, at least 96%, at least 97%, at least 98%, at least 99%, or 100% sequence identity to any one of SEQ ID NOs:70-78 or 597 or a variant thereof, wherein the endonuclease is configured to be deficient in nuclease activity; and a base editor coupled to said endonuclease. In some aspects, the present disclosure provides for an engineered nucleic acid editing polypeptide, comprising: an endonuclease configured to bind to a protospacer adjacent motif (PAM) sequence comprising any one of SEQ ID NOs: 360-368 or 598, wherein said endonuclease is a class 2, type II Cas endonuclease, and wherein the endonuclease is configured to be deficient in nuclease activity; and a base editor coupled to said endonuclease. In some embodiments, said endonuclease is derived from an uncultivated microorganism. In some embodiments, said endonuclease has less than 80% identity to a Cas9 endonuclease. In some embodiments, said endonuclease further comprises an HNH domain. In some embodiments, said tracr ribonucleic acid sequence comprises a sequence with at least 80% sequence identity to about 60 to 90 consecutive nucleotides selected from any one of SEQ ID NOs: 88-96, 488, and 489. In some embodiments, said base editor comprises a sequence with at least 70%, 80%, 90% or 95% identity to any one of SEQ ID NOs: 1-51, 57-66, 385-443, 444-475, or 594-595 or a variant thereof. In some embodiments, said base editor is an adenine deaminase. In some embodiments, said adenosine deaminase comprises a sequence with at least 70%, 80%, 90% or 95% sequence identity to any one of SEQ ID NOs: 50-51, 57, 385-443, 448-475, or 595 or a variant thereof. In some embodiments, said base editor is a cytosine deaminase. In some embodiments, said cytosine deaminase comprises a sequence with at least 70%, 80%, 90% or 95% sequence identity to any one of SEQ ID NOs: 1-49, 444-447, 594, or 58-66 or a variant thereof.

[0016] In some aspects, the present disclosure provides for an engineered nucleic acid editing polypeptide, comprising: an endonuclease, wherein said endonuclease is configured to be deficient in endonuclease activity; and a base editor coupled to said endonuclease, wherein said base editor comprises a sequence with at least 70%, 80%, 90% or 95% sequence identity to any one of SEQ ID NOs: 1-51, 385-386, 387-443, 444-447,488-475, or 595, or a variant thereof. In some embodiments, said endonuclease is configured to cleave one strand of a double-stranded target deoxyribonucleic acid. In some embodiments, said endonuclease is configured to be catalytically dead. In some embodiments, said endonuclease is a Cas endonuclease. In some embodiments, said Cas endonuclease is a Class II, type II Cas endonuclease or a Class II, type V Cas endonuclease. In some embodiments, said endonuclease comprises a sequence having at least 70%, 80%, 90% or 95% sequence identity to any one of SEQ ID NOs:70-78 or 597 or a variant thereof. In some embodiments, said Cas endonuclease comprises a nickase mutation. In some embodiments, said Cas endonuclease comprises the aspartate to alanine mutation at residue 9 relative to SEQ ID NO: 70, residue 13 relative to SEQ ID NOs: 71, 72, or 74, residue 12 relative to SEQ ID NO: 73, residue 17 relative to SEQ ID NO: 75, residue 23 relative to SEQ ID NO: 76, or residue 10 relative to SEQ ID NO: 597 when optimally aligned. In some embodiments, said endonuclease is configured to bind to a protospacer adjacent motif (PAM) sequence selected from the group consisting of SEQ ID NOs: 360-368 or 598. In some embodiments, said base editor is an adenine deaminase. In some embodiments, said adenosine deaminase comprises a sequence with at least 80%, at least 81%, at least 82%, at least 83%, at least 84%, at least 85%, at least 86%, at least 87%, at least 88%, at least 89%, at least 90%, at least 91%, at least 92%, at least 93%, at least 94%, at least 95%, at least 96%, at least 97%, at least 98%, at least 99%, or 100% sequence identity to any one of SEQ ID NOs: 50-51, 385-443, or 448-475 or a variant thereof. In some embodiments, said adenosine deaminase comprises a sequence with at least 70%, 80%, 90% or 95% identity to any one of SEQ ID NOs: 50-51, 385-390, or 595, or a variant thereof. In some embodiments, said base editor is a cytosine deaminase. In some embodiments, said cytosine deaminase comprises a sequence with at least 70%, 80%, 90% or 95% identity to any one of SEQ ID NOs: 1-49, 444-447 or a variant thereof. In some embodiments, the polypeptide further comprises a uracil DNA glycosylase inhibitor coupled to said endonuclease or said base editor. In some embodiments, said uracil DNA glycosylase inhibitor comprises a sequence with at least 70%, 80%, 90% or 95% identity to any one of SEQ ID NOs: 52-56 or SEQ ID NO: 67 or a variant thereof. In some embodiments, said endonuclease comprises one or more nuclear localization sequences (NLSs) proximal to an N- or C-terminus of said endonuclease. In some embodiments, said NLS comprises a sequence with at least 90% identity to a selected from SEQ ID NOs: 369-384 or a variant thereof. In some embodiments, said endonuclease is covalently coupled directly to said base editor or covalently coupled to said base editor through a linker.

[0017] In some aspects, the present disclosure provides for a nucleic acid comprising an engineered nucleic acid sequence optimized for expression in an organism, wherein said nucleic acid encodes a sequence having at least 70%, at least 80%, at least 81%, at least 82%, at least 83%, at least 84%, at least 85%, at least 86%, at least 87%, at least 88%, at least 89%, at least 90%, at least 91%, at least 92%, at least 93%, at least 94%, at least 95%, at least 96%, at least 97%, at least 98%, at least 99%, or 100% sequence identity to any one of SEQ ID NOs: 1-51, 385-386, 387-443, 444-447, or 488-475 or a variant thereof. In some embodiments, said organism is prokaryotic, bacterial, eukaryotic, fungal, plant, mammalian, rodent, or human.

[0018] In some aspects, the present disclosure provides for a vector comprising the nucleic acid of any of the aspects or embodiments described herein. In some embodiments, the vector is a plasmid, a minicircle, a CELiD, an adeno-associated virus (AAV) derived virion, or a lentivirus.

[0019] In some aspects, the present disclosure provides for a cell comprising the vector of any one of the aspects or embodiments described herein.

[0020] In some aspects, the present disclosure provides for a method of manufacturing a base editor, comprising cultivating said cell of any one of the aspects or embodiments described herein.

[0021] In some aspects, the present disclosure provides for a system comprising: (a) the nucleic acid editing polypeptide of any of the aspects or embodiments described herein; and (b) an engineered guide ribonucleic acid structure configured to form a complex with said nucleic acid editing polypeptide comprising: a guide ribonucleic acid sequence configured to hybridize to a target deoxyribonucleic acid sequence; and a ribonucleic acid sequence configured to bind to said endonuclease. In some embodiments, said engineered guide ribonucleic acid sequence comprises a sequence with at least 80% sequence identity to non-degenerate nucleotides of any one of SEQ ID NOs: 88-96 or 488-489.

[0022] In some aspects, the present disclosure provides for a method of modifying a target nucleic acid locus, said method comprising delivering to said target nucleic acid locus said engineered nucleic acid editing polypeptide of any of the aspects or embodiments described herein or said system of any of the aspects or embodiments described herein, wherein said complex is configured such that upon binding of said complex to said target nucleic acid locus, said complex modifies a nucleotide of said target nucleic locus.

[0023] In some aspects, the present disclosure provides for an engineered nucleic acid editing system, comprising: (a) an endonuclease comprising a RuvC domain and an HNH domain, wherein the endonuclease is derived from an uncultivated microorganism, wherein the endonuclease is a class 2, type II Cas endonuclease, and wherein the RuvC domain lacks nuclease activity; (b) a base editor coupled to the endonuclease; and (c) an engineered guide ribonucleic acid structure configured to form a complex with the endonuclease comprising: (i) a guide ribonucleic acid sequence configured to hybridize to a target deoxyribonucleic acid sequence; and (ii) a tracr ribonucleic acid sequence configured to bind to the endonuclease. In some embodiments, the endonuclease comprises a sequence with at least 95% sequence identity to any one of SEQ ID NOs: 70-78.

[0024] In some aspects, the present disclosure provides for an engineered nucleic acid editing system comprising: (a) an endonuclease having at least 95% sequence identity to any one of SEQ ID NOs: 70-78, wherein the endonuclease comprises a RuvC domain lacking nuclease activity; a base editor coupled to the endonuclease; and an engineered guide ribonucleic acid structure configured to form a complex with the endonuclease comprising: (i) a guide ribonucleic acid sequence configured to hybridize to a target deoxyribonucleic acid sequence; and (ii) a tracr ribonucleic acid sequence configured to bind to the endonuclease.

[0025] In some aspects, the present disclosure provides for an engineered nucleic acid editing system comprising: (a) an endonuclease configured to bind to a protospacer adjacent motif (PAM) sequence comprising SEQ ID NOs: 360-368, wherein the endonuclease is a class 2, type II Cas endonuclease, and wherein the endonuclease comprises a RuvC domain lacking nuclease activity; and (b) a base editor coupled to the endonuclease; and (c) an engineered guide ribonucleic acid structure configured to form a complex with the endonuclease comprising: (i) a guide ribonucleic acid sequence configured to hybridize to a target deoxyribonucleic acid sequence; and (ii) a tracr ribonucleic acid sequence configured to bind to the endonuclease.

[0026] In some embodiments, the endonuclease is derived from an uncultivated microorganism. In some embodiments, the endonuclease has less than 80% identity to a Cas9 endonuclease. In some embodiments, the endonuclease further comprises an HNH domain. In some embodiments, the tracr ribonucleic acid sequence comprises a sequence with at least 80% sequence identity to about 60 to 90 consecutive nucleotides selected from any one of SEQ ID NOs: 88-96, 488, and 489.

[0027] In some aspects, the present disclosure provides an engineered nucleic acid editing system comprising, (a) an engineered guide ribonucleic acid structure comprising: (i) a guide ribonucleic acid sequence configured to hybridize to a target deoxyribonucleic acid sequence; and (ii) a tracr ribonucleic acid sequence configured to bind to an endonuclease, wherein the tracr ribonucleic acid sequence comprises a sequence with at least 80% sequence identity to about 60 to 90 consecutive nucleotides selected from any one of SEQ ID NOs: 88-96, 488, and 489; and a class 2, type II Cas endonuclease configured to bind to the engineered guide ribonucleic acid.

[0028] In some embodiments, the endonuclease is configured to bind to a protospacer adjacent motif (PAM) sequence selected from the group consisting of SEQ ID NOs: 360-368. In some embodiments, the base editor comprises a sequence with at least 70%, 80%, 90% or 95% identity to any one of SEQ ID NOs: 1-51 and 385-475. In some embodiments, the base editor is an adenine deaminase. In some embodiments, the adenosine deaminase comprises a sequence with at least 95% identity to SEQ ID NO: 57. In some embodiments, the base editor is a cytosine deaminase. In some embodiments, the cytosine deaminase comprises a sequence with at least 95% identity to SEQ ID NO: 58. In some embodiments, the cytosine deaminase comprises a sequence with at least 95% identity to any one of SEQ ID NOs: 59-66.

[0029] In some embodiments, the engineered nucleic acid editing system further comprises a uracil DNA glycosylase inhibitor. In some embodiments, the uracil DNA glycosylase inhibitor comprises a sequence with at least 70%, 80%, 90% or 95% identity to any one of SEQ ID NOs: 52-56 or SEQ ID NO: 67.

[0030] In some embodiments, the engineered guide ribonucleic acid structure comprises at least two ribonucleic acid polynucleotides. In some embodiments, the engineered guide ribonucleic acid structure comprises one ribonucleic acid polynucleotide comprising the guide ribonucleic acid sequence and the tracr ribonucleic acid sequence. In some embodiments, the guide ribonucleic acid sequence is complementary to a prokaryotic, bacterial, archaeal, eukaryotic, fungal, plant, mammalian, or human genomic sequence. In some embodiments, the guide ribonucleic acid sequence is 15-24 nucleotides in length. In some embodiments, the endonuclease comprises one or more nuclear localization sequences (NLSs) proximal to an N- or C-terminus of said endonuclease. In some embodiments, the endonuclease is covalently coupled directly to the base editor or covalently coupled to the base editor through a linker. In some embodiments, a polypeptide comprises the endonuclease and the base editor. In some embodiments, the endonuclease is configured to cleave one strand of a double-stranded target deoxyribonucleic acid. In some embodiments, the endonuclease comprises SEQ ID NO: 370. In some embodiments, the system further comprises a source of Mg²⁺.

[0031] In some embodiments, the endonuclease comprises a sequence at least 70%, at least 80%, or at least 90% identical to SEQ ID NO: 70; the guide RNA structure comprises a sequence at least 70%, at least 80%, or at least 90% identical to SEQ ID NO: 88; and the endonuclease is configured to bind to a PAM comprising SEQ ID NO: 360.

[0032] In some embodiments, the endonuclease comprises a sequence at least 70%, at least 80%, or at least 90% identical to SEQ ID NO: 71; the guide RNA structure comprises a sequence at least 70%, at least 80%, or at least 90% identical to SEQ ID NO: 89; and the endonuclease is configured to bind to a PAM comprising SEQ ID NO: 361.

[0033] In some embodiments, the endonuclease comprises a sequence at least 70%, at least 80%, or at least 90% identical to SEQ ID NO: 73; the guide RNA structure comprises a sequence at least 70%, at least 80%, or at least 90% identical to SEQ ID NO: 91; and the endonuclease is configured to bind to a PAM comprising SEQ ID NO: 363.

[0034] In some embodiments, the endonuclease comprises a sequence at least 70%, at least 80%, or at least 90% identical to SEQ ID NO: 75; the guide RNA structure comprises a sequence at least 70%, at least 80%, or at least 90% identical to SEQ ID NO: 93; and the endonuclease is configured to bind to a PAM comprising SEQ ID NO: 365.

[0035] In some embodiments, the endonuclease comprises a sequence at least 70%, at least 80%, or at least 90% identical to SEQ ID NO: 76; the guide RNA structure comprises a sequence at least 70%, at least 80%, or at least 90% identical to SEQ ID NO: 94; and the endonuclease is configured to bind to a PAM comprising SEQ ID NO: 366.

[0036] In some embodiments, the endonuclease comprises a sequence at least 70%, at least 80%, or at least 90% identical to SEQ ID NO: 77; the guide RNA structure comprises a sequence at least 70%, at least 80%, or at least 90% identical to SEQ ID NO: 95; and the endonuclease is configured to bind to a PAM comprising SEQ ID NO: 367.

[0037] In some embodiments, the endonuclease comprises a sequence at least 70%, at least 80%, or at least 90% identical to SEQ ID NO: 78; the guide RNA structure comprises a sequence at least 70%, at least 80%, or at least 90% identical to SEQ ID NO: 96; and the endonuclease is configured to bind to a PAM comprising SEQ ID NO: 368.

[0038] In some embodiments, the base editor comprises an adenine deaminase. In some embodiments, the adenine deaminase comprises SEQ ID NO: 57. In some embodiments, the base editor comprises a cytosine deaminase. In some embodiments, the cytosine deaminase comprises SEQ ID NO: 58. In some embodiments, the engineered nucleic acid editing system described herein further comprises a uracil DNA glycosylation inhibitor. In some embodiments, the uracil DNA glycosylation inhibitor comprises SEQ ID NO: 67.

[0039] In some embodiments, the sequence identity is determined by a BLASTP, CLUSTALW, MUSCLE, MAFFT, or Smith-Waterman homology search algorithm. In some embodiments, the sequence identity is determined by said BLASTP homology search algorithm using parameters of a wordlength (W) of 3, an expectation (E) of 10, and a BLOSUM62 scoring matrix setting gap costs at existence of 11, extension of 1, and using a conditional compositional score matrix adjustment.

[0040] In some aspects, the present disclosure provides a nucleic acid comprising an engineered nucleic acid sequence optimized for expression in an organism, wherein the nucleic acid encodes a class 2, type II Cas endonuclease coupled to a base editor, and wherein the endonuclease is derived from an uncultivated microorganism.

[0041] In some aspects, the present disclosure provides a nucleic acid comprising an engineered nucleic acid sequence optimized for expression in an organism, wherein the nucleic acid encodes an endonuclease having at least 70% sequence identity to any one of SEQ ID NOs: 70-78 coupled to a base editor. In some embodiments, the endonuclease comprises a sequence encoding one or more nuclear localization sequences (NLSs) proximal to an N- or C-terminus of said endonuclease. In some embodiments, the organism is prokaryotic, bacterial, eukaryotic, fungal, plant, mammalian, rodent, or human.

[0042] In some aspects, the present disclosure provides a vector comprising a nucleic acid sequence encoding a class 2, type II Cas endonuclease coupled to a base editor, wherein said endonuclease is derived from an uncultivated microorganism. In some embodiments, the vector comprises the nucleic acid described herein. In some embodiments, the vector further comprises a nucleic acid encoding an engineered guide ribonucleic acid structure configured to form a complex with the endonuclease comprising: a guide ribonucleic acid sequence configured to hybridize to a target deoxyribonucleic acid sequence; and a tracr ribonucleic acid sequence configured to binding to the endonuclease. In some embodiments, the vector is a plasmid, a minicircle, a CELiD, an adeno-associated virus (AAV) derived virion, or a lentivirus. In some aspects, the present disclosure provides a cell comprising the vector described herein. In some aspects, the present disclosure provides a method of manufacturing an endonuclease, comprising cultivating the cell described herein.

[0043] In some aspects, the present disclosure provides a method for modifying a double-stranded deoxyribonucleic acid polynucleotide comprising contacting the double-stranded deoxyribonucleic acid polynucleotide with a complex comprising: an endonuclease comprising a RuvC domain and an HNH domain, wherein the endonuclease is derived from an uncultivated microorganism, wherein the endonuclease is a class 2, type II Cas endonuclease, and wherein the RuvC domain lacks nuclease activity; a base editor coupled to the endonuclease; and an engineered guide ribonucleic acid structure configured to bind to the endonuclease and the double-stranded deoxyribonucleic acid polynucleotide; wherein the double-stranded deoxyribonucleic acid polynucleotide comprises a protospacer adjacent motif (PAM).

[0044] In some embodiments, the endonuclease comprising a RuvC domain and an HNH domain is covalently coupled directly to the base editor or covalently coupled to the base editor through a linker. In some embodiments, the endonuclease comprising a RuvC domain and an HNH domain comprises a sequence with at least 95% sequence identity to any one of SEQ ID NOs: 70-78.

[0045] In some aspects, the present disclosure provides a method for modifying a double-stranded deoxyribonucleic acid polynucleotide, comprising contacting the double-stranded deoxyribonucleic acid polynucleotide with a complex comprising: a class 2, type II Cas endonuclease, a base editor coupled to the endonuclease, and an engineered guide ribonucleic acid structure configured to bind to the endonuclease and the double-stranded deoxyribonucleic acid polynucleotide; wherein the double-stranded deoxyribonucleic acid polynucleotide comprises a protospacer adjacent motif (PAM); and wherein the PAM comprises a sequence selected from the group consisting of SEQ ID NOs: 360-368.

[0046] In some embodiments, the class 2, type II Cas endonuclease is covalently coupled to the base editor or coupled to the base editor through a linker. In some embodiments, the base editor comprises a sequence with at least 70%, at least 80%, at least 90% or at least 95% identity to a sequence selected from SEQ ID NOs: 1-51 and 385-475. In some embodiments, the base editor comprises an adenine deaminase; the double-stranded deoxyribonucleic acid polynucleotide comprises an adenine; and modifying the double-stranded deoxyribonucleic acid polypeptide comprises converting the adenine to guanine. In some embodiments, the adenine deaminase comprises a sequence with at least 95% identity to SEQ ID NO: 57.

[0047] In some embodiments, the base editor comprises a cytosine deaminase; the double-stranded deoxyribonucleic acid polynucleotide comprises a cytosine; and modifying the double-stranded deoxyribonucleic acid polypeptide comprises converting the cytosine to uracil. In some embodiments, the cytosine deaminase comprises a sequence with at least 95% identity to SEQ ID NO: 58. In some embodiments, the cytosine deaminase comprises a sequence with at least 95% identity to any one of SEQ ID NOs: 59-66.

[0048] In some embodiments, the complex further comprises a uracil DNA glycosylase inhibitor. In some embodiments, the uracil DNA glycosylase inhibitor comprises a sequence with at least 70%, 80%, 90% or 95% identity to any one of SEQ ID NOs: 52-56 or SEQ ID NO: 67. In some embodiments, the double-stranded deoxyribonucleic acid polynucleotide comprises a first strand comprising a sequence complementary to a sequence of the engineered guide ribonucleic acid structure and a second strand comprising said PAM. In some embodiments, the PAM is directly adjacent to the 3′ end of the sequence complementary to the sequence of the engineered guide ribonucleic acid structure.

[0049] In some embodiments, the class 2, type II Cas endonuclease is not a Cas9 endonuclease, a Cas14 endonuclease, a Cas12a endonuclease, a Cas12b endonuclease, a Cas 12c endonuclease, a Cas12d endonuclease, a Cas12e endonuclease, a Cas13a endonuclease, a Cas13b endonuclease, a Cas13c endonuclease, or a Cas 13d endonuclease. In some embodiments, the class 2, type II Cas endonuclease is derived from an uncultivated microorganism. In some embodiments, the double-stranded deoxyribonucleic acid polynucleotide is a eukaryotic, plant, fungal, mammalian, rodent, or human double-stranded deoxyribonucleic acid polynucleotide.

[0050] In some aspects, the present disclosure provides a method of modifying a target nucleic acid locus, said method comprising delivering to said target nucleic acid locus the engineered nucleic acid editing system described herein, wherein the endonuclease is configured to form a complex with the engineered guide ribonucleic acid structure, and wherein the complex is configured such that upon binding of the complex to the target nucleic acid locus, the complex modifies a nucleotide of the target nucleic locus.

[0051] In some embodiments, the engineered nucleic acid editing system comprises an adenine deaminase, the nucleotide is an adenine, and modifying the target nucleic acid locus comprises converting the adenine to a guanine. In some embodiments, the engineered nucleic acid editing system comprises a cytidine deaminase and a uracil DNA glycosylase inhibitor, the nucleotide is a cytosine and modifying the target nucleic acid locus comprises converting the adenine to a uracil. In some embodiments, the target nucleic acid locus comprises genomic DNA, viral DNA, or bacterial DNA. In some embodiments, the target nucleic acid locus is in vitro. In some embodiments, the target nucleic acid locus is within a cell. In some embodiments, the cell is a prokaryotic cell, a bacterial cell, a eukaryotic cell, a fungal cell, a plant cell, an animal cell, a mammalian cell, a rodent cell, a primate cell, or a human cell. In some embodiments, the cell is within an animal.

[0052] In some embodiments, the cell is within a cochlea. In some embodiments, the cell is within an embryo. In some embodiments, the embryo is a two-cell embryo. In some embodiments, the embryo is a mouse embryo. In some embodiments, delivering the engineered nucleic acid editing system to the target nucleic acid locus comprises delivering the nucleic acid described herein or the vector described herein. In some embodiments, delivering the engineered nucleic acid editing system to the target nucleic acid locus comprises delivering a nucleic acid comprising an open reading frame encoding the endonuclease.

[0053] In some embodiments, the nucleic acid comprises a promoter to which the open reading frame encoding the endonuclease is operably linked. In some embodiments, delivering the engineered nucleic acid editing system to said target nucleic acid locus comprises delivering a capped mRNA containing the open reading frame encoding the endonuclease. In some embodiments, delivering the engineered nucleic acid editing system to the target nucleic acid locus comprises delivering a translated polypeptide. In some embodiments, delivering the engineered nucleic acid editing system to the target nucleic acid locus comprises delivering a deoxyribonucleic acid (DNA) encoding the engineered guide ribonucleic acid structure operably linked to a ribonucleic acid (RNA) pol III promoter.

[0054] In some aspects, the present disclosure provides an engineered nucleic acid editing polypeptide, comprising: an endonuclease comprising a RuvC domain and an HNH domain, wherein the endonuclease is derived from an uncultivated microorganism, wherein the endonuclease is a class 2, type II Cas endonuclease, and wherein the RuvC domain lacks nuclease activity; and a base editor coupled to the endonuclease. In some embodiments, the endonuclease comprises a sequence with at least 95% sequence identity to any one of SEQ ID NOs: 70-78.

[0055] In some aspects, the present disclosure provides an engineered nucleic acid editing polypeptide, comprising: an endonuclease having at least 95% sequence identity to any one of SEQ ID NOs: 70-78, wherein the endonuclease comprises a RuvC domain lacking nuclease activity; and a base editor coupled to the endonuclease.

[0056] In some aspects, the present disclosure provides an engineered nucleic acid editing polypeptide, comprising: an endonuclease configured to bind to a protospacer adjacent motif (PAM) sequence comprising SEQ ID NOs: 360-368, wherein the endonuclease is a class 2, type II Cas endonuclease, and wherein the endonuclease comprises a RuvC domain lacks nuclease activity; and a base editor coupled to the endonuclease.

[0057] In some embodiments, the endonuclease is derived from an uncultivated microorganism. In some embodiments, the endonuclease has less than 80% identity to a Cas9 endonuclease. In some embodiments, the endonuclease further comprises an HNH domain. In some embodiments, the tracr ribonucleic acid sequence comprises a sequence with at least 80% sequence identity to about 60 to 90 consecutive nucleotides selected from any one of SEQ ID NOs: 88-96, 488, and 489. In some embodiments, the base editor comprises a sequence with at least 70%, 80%, 90% or 95% identity to any one of SEQ ID NOs: 1-51 and 385-475. In some embodiments, the base editor is an adenine deaminase. In some embodiments, the adenosine deaminase comprises a sequence with at least 95% identity to SEQ ID NO: 57. In some embodiments, the base editor is a cytosine deaminase. In some embodiments, the cytosine deaminase comprises a sequence with at least 95% identity to SEQ ID NO: 58. In some embodiments, the adenosine cytosine deaminase comprises a sequence with at least 95% identity to any one of SEQ ID NOs: 59-66.

[0058] Additional aspects and advantages of the present disclosure will become readily apparent to those skilled in this art from the following detailed description, wherein only illustrative embodiments of the present disclosure are shown and described. As will be realized, the present disclosure is capable of other and different embodiments, and its several details are capable of modifications in various obvious respects, all without departing from the disclosure. Accordingly, the drawings and description are to be regarded as illustrative in nature, and not as restrictive.

### Incorporation by Reference

[0059] All publications, patents, and patent applications mentioned in this specification are herein incorporated by reference to the same extent as if each individual publication, patent, or patent application was specifically and individually indicated to be incorporated by reference.

### BRIEF DESCRIPTION OF THE DRAWINGS

[0060] The novel features of the invention are set forth with particularity in the appended claims. A better understanding of the features and advantages of the present invention will be obtained by reference to the following detailed description that sets forth illustrative embodiments, in which the principles of the invention are utilized, and the accompanying drawings (also “Figure” and “FIG.” herein), of which:

[0061] FIG. 1 depicts typical organizations of CRISPR/Cas loci of different classes and types.

[0062] FIG. 2 shows the structure of a base editor plasmid containing a T7 promoter driving expression of the systems described herein.

[0063] FIG. 3 shows plasmid maps for systems described herein. MGA contains TadA*(from ABE8.17m)-SV40 NLS and MGC contains APOBEC1 (from BE3) linked to a uracil glycosylase inhibitor and an SV40 NLS.

[0064] FIG. 4 shows predicted catalytic residues in the RuvCI domains of selected endonucleases described herein which are mutated to disrupt nuclease activity to generate nickase enzymes.

[0065] FIG. 5 depicts an exemplary method for cloning a single guide RNA expression cassette into the systems described herein. One fragment comprises a T7 promoter plus spacer. The other fragment comprises spacer plus single guide scaffold sequence plus bidirectional terminator. The fragments are assembled into expression plasmids, resulting in functional constructs that can simultaneously express sgRNAs and base editors.

[0066] FIGS. 6A and 6B show sgRNA designs for lacZ targeting in E. coli. The spacer length used for the systems described herein was 22 nucleotides. For selected systems described herein, three sgRNAs targeting lacZ in E. coli were designed to determine editing windows.

[0067] FIG. 7 shows the nickase activity of selected mutated effectors. 600 bp double-stranded DNA fragments labeled with a fluorophore (6-FAM) on both 5′ ends were incubated with purified enzymes supplemented with their cognate sgRNAs. The reaction products were resolved on a 10% TBE-Urea denaturing gel. Double-stranded cleavage yields bands of 400 and 200 bases. Nickase activity yields bands of 600 and 200 bases.

[0068] FIGS. 8A, 8B, and 8C shows Sanger sequencing results demonstrating base edits by selected systems described herein.

[0069] FIG. 9 shows how the systems described herein expand base-editing capabilities with the endonucleases and base editors described herein.

[0070] FIGS. 10A and 10B show base editing efficiencies of adenine base editors (ABEs) comprising TadA (ABE8.17m) and MG nickases. TadA is a tRNA adenine deaminase, and TadA (ABE8.17m) is an engineered variant of E. coli TadA. 12 MG nickases fused with TadA (ABE8.17m) were constructed and tested in E. coli. Three guides were designed to target lacZ. Numbers shown in boxes indicate percentages of A to G conversion quantified by Edit R. ABE8.17m was used as the positive control for the experiment.

[0071] FIGS. 11A and 11B show base editing efficiencies of cytosine base editors (CBEs) comprising rat APOBEC1, MG nickases, and the uracil glycosylase inhibitor of Bacillus subtilis bacteriophage (UGI (PBS1)). APOBEC1 is a cytosine deaminase. 12 MG nickases fused to rAPOBEC1 on their N-terminus and UGI on their C-terminus were constructed and tested in E. coli. Three guides were designed to target lacZ. The numbers shown in boxes indicate percentages of C to T conversion quantified by Edit R. BE3 was used as the positive control in the experiment.

[0072] FIG. 12 shows effects of MG uracil glycosylase inhibitors (UGIs) on the base-editing activities of CBEs. Panel (a) depicts a graph showing base-editing activity of MGC15-1 and variants, which comprise an N-terminal APOBEC1, the MG15-1 nickase, and a C-terminal UGI. Three MG UGIs were tested for improvements of cytosine base editing activities in E. coli. Panel (b) is a graph showing base editing activity of BE3, which comprises an N-terminal rAPOBEC1, the SpCas9 nickase, and a C-terminal UGI. Two MG UGIs were tested for improvements of cytosine base editing activities in HEK293T cells. Editing efficiencies were quantified by Edit R.

[0073] FIGS. 13A and 13B depicts maps of edited sites showing editing efficiencies of cytosine base editors comprising A0A2K5RDN7, an MG nickases, and an MG UGI. The constructs comprise an N-terminal A0A2K5RDN7, an MG nickases, and a C-terminal MG69-1. For simplicity, only the identities of MG nickases are shown in the figure. BE3 was used as the positive control for base editing. An empty vector was used for the negative control. Three independent experiments were performed on different days. Abbreviations: R, repeat; NEG, negative control.

[0074] FIG. 14 shows a positive selection method for TadA characterization in E. coli. Panel (a) shows a map of one plasmid system used for TadA selection. The vector comprises CAT (H193Y), a sgRNA expression cassette targeting CAT, and an ABE expression cassette. In this figure, N-terminal TadA from E. coli and a C-terminal SpCas9 (D10A) from Streptococcus pyogenes are shown. Panel (b) shows sequencing traces demonstrating that when introduced/transformed into E. coli cells, the A2 position of CAT (H193Y)'s template strand is edited, reverting the H193Y mutant to wild type and restoring its activity. Abbreviations: CAT, chloramphenicol acetyltransferase.

[0075] FIG. 15 shows mutations caused by TadA enable high tolerance of chloramphenicol (Cm). Panel (a) shows photographs of growth plates where different concentrations of chloramphenicol were used to select for antibiotics resistance of E. coli. In this example, wild type and two variants of TadA from E. coli (EcTadA) were tested. Panel (b) shows a results summary table demonstrating that ABEs carrying mutated TadA show higher editing efficiencies than the wild type. In these experiments, colonies were picked from the plates with greater than or equal to 0.5 μg/mL Cm. For simplicity, only identities of deaminases are shown in the table.

[0076] FIG. 16A shows photographs of growth plates to investigate MG TadA activity in positive selection. 8 MG68 TadA candidates were tested against 0 to 2 μg/mL of chloramphenicol (ABEs comprised N-terminal TadA variants and C-terminal SpCas9 (D10A) nickase). For simplicity, only identities of deaminases are shown. In this experiment, colonies were picked from the plates with greater than or equal to 0.5 μg/mL Cm.

[0077] FIG. 16B summarizes the editing efficiencies of MG TadA candidates and demonstrates that MG68-3, and MG68-4 drove base edits of adenine.

[0078] FIG. 17 shows an improvement of base editing efficiency of MG68-4_nSpCas9 via D109N mutation on MG68-4. Panel (a) shows photographs of growth plates where wild type MG68-4 and its variant were tested against 0 to 4 μg/mL of chloramphenicol. For simplicity, only identities of deaminases are shown. Adenine base editors in this experiment are comprise N-terminal TadA variants and C-terminal SpCas9 (D10A) nickase. Panel (b) shows a summary table depicting editing efficiencies of MG TadA candidates. Panel (b) demonstrates that MG68-4 and MG68-4 (D109N) showed base edits of adenine, with the D109N mutant showing increased activity. In this experiment, colonies were picked from the plates with greater than or equal to 0.5 μg/mL Cm.

[0079] FIG. 18 shows base editing of MG68-4 (D109N) nMG34-1. Panel (a) shows photographs of growth plates of an experiment where an ABE comprising N-terminal MG68-4 (D109N) and C-terminal SpCas9 (D10A) nickase was tested against 0 to 2 μg/mL of chloramphenicol. Panel (b) shows a summary table depicting editing efficiencies with and without sgRNA. In this experiment, colonies were picked from the plates with greater than or equal to 1 μg/mL Cm.

[0080] FIG. 19 shows 28 MG68-4 variants designed for improvements of MG68-4-nMG34-1 base editing activity (SEQ ID NOs: 448-475). 12 residues were selected for targeted mutagenesis to improve editing of the enzymes.

### BRIEF DESCRIPTION OF THE SEQUENCE LISTING

[0081] The Sequence Listing filed herewith provides exemplary polynucleotide and polypeptide sequences for use in methods, compositions and systems according to the disclosure. Below are exemplary descriptions of sequences therein.

[0082] SEQ ID NOs: 1-47 show the full-length peptide sequences of MG66 deaminases suitable for the engineered nucleic acid editing systems described herein.

[0083] SEQ ID NOs: 48-49 show the full-length peptide sequences of MG67 deaminases suitable for the engineered nucleic acid editing systems described herein.

[0084] SEQ ID NOs: 50-51 show the full-length peptide sequences of MG68 deaminases suitable for the engineered nucleic acid editing systems described herein.

[0085] SEQ ID NOs: 52-56 show the sequences of uracil DNA glycosylase inhibitors suitable for the engineered nucleic acid editing systems described herein.

[0086] SEQ ID NOs: 57-66 show the sequences of reference deaminases.

[0087] SEQ ID NO: 67 shows the sequence of a reference uracil DNA glycosylase inhibitor.

[0088] SEQ ID NO: 68 shows the sequence of an adenine base editor.

[0089] SEQ ID NO: 69 shows the sequence of a cytosine base editor.

[0090] SEQ ID NOs: 70-78 show the full-length peptide sequences of MG nickases suitable for the engineered nucleic acid editing systems described herein.

[0091] SEQ ID NOs: 79-87 shows the protospacer and PAM used in in vitro nickase assays described herein.

[0092] SEQ ID NOs: 88-96 show the peptide sequences of single guide RNA used in in vitro nickase assays described herein.

[0093] SEQ ID NOs: 97-156 show the sequences of spacers when targeting E. coli lacZ.

[0094] SEQ ID NOs: 157-176 show the sequences of primers when conducting site directed mutagenesis.

[0095] SEQ ID NOs: 177-178 show the sequences of primers for lacZ sequencing.

[0096] SEQ ID NOs: 179-342 show the sequences of primers used during amplification.

[0097] SEQ ID NOs: 343-345 show the sequences of primers for lacZ sequencing.

[0098] SEQ ID NOs: 346-359 show the sequences of primers used during amplification.

[0099] SEQ ID NOs: 360-368 show protospacer adjacent motifs suitable for the engineered nucleic acid editing systems described herein.

[0100] SEQ ID NOs: 369-384 show nuclear localization sequences (NLS's) suitable for the engineered nucleic acid editing systems described herein.

[0101] SEQ ID NOs: 385-443 show the full-length peptide sequences of MG68 deaminases suitable for the engineered nucleic acid editing systems described herein.

[0102] SEQ ID NOs: 444-447 show the full-length peptide sequences of MG121 deaminases suitable for the engineered nucleic acid editing systems described herein.

[0103] SEQ ID NOs: 448-475 show the full-length peptide sequences of MG68 deaminases suitable for the engineered nucleic acid editing systems described herein.

[0104] SEQ ID NOs: 476 and 477 show sequences of adenine base editors.

[0105] SEQ ID NOs: 478-482 show sequences of cytosine base editors.

[0106] SEQ ID NOs: 483-487 show the sequences of plasmids suitable for encoding the engineered nucleic acid editing systems described herein.

[0107] SEQ ID NOs: 488 and 489 show the sgRNA scaffold sequences for MG15-1 and MG34-1.

[0108] SEQ ID NOs: 490-522 show the sequences of spacers used to target genomic loci in E. coli and HEK293T cells.

[0109] SEQ ID NOs: 523-585 show the sequences of primers used during amplification and Sanger sequencing.

### DETAILED DESCRIPTION

[0110] While various embodiments of the invention have been shown and described herein, it will be obvious to those skilled in the art that such embodiments are provided by way of example only. Numerous variations, changes, and substitutions may occur to those skilled in the art without departing from the invention. It should be understood that various alternatives to the embodiments of the invention described herein may be employed.

[0111] The practice of some methods disclosed herein employ, unless otherwise indicated, techniques of immunology, biochemistry, chemistry, molecular biology, microbiology, cell biology, genomics and recombinant DNA. See for example Sambrook and Green, Molecular Cloning: A Laboratory Manual, 4th Edition (2012); the series Current Protocols in Molecular Biology (F. M. Ausubel, et al. eds.); the series Methods In Enzymology (Academic Press, Inc.), PCR 2: A Practical Approach (M. J. MacPherson, B. D. Hames and G. R. Taylor eds. (1995)), Harlow and Lane, eds. (1988) Antibodies, A Laboratory Manual, and Culture of Animal Cells: A Manual of Basic Technique and Specialized Applications, 6th Edition (R. I. Freshney, ed. (2010)) (which is entirely incorporated by reference herein).

[0112] As used herein, the singular forms “a”, “an” and “the” are intended to include the plural forms as well, unless the context clearly indicates otherwise. Furthermore, to the extent that the terms “including”, “includes”, “having”, “has”, “with”, or variants thereof are used in either the detailed description and/or the claims, such terms are intended to be inclusive in a manner similar to the term “comprising.”

[0113] The term “about” or “approximately” means within an acceptable error range for the particular value as determined by one of ordinary skill in the art, which will depend in part on how the value is measured or determined, i.e., the limitations of the measurement system. For example, “about” can mean within one or more than one standard deviation, per the practice in the art. Alternatively, “about” can mean a range of up to 20%, up to 15%, up to 10%, up to 5%, or up to 1% of a given value.

[0114] As used herein, a “cell” generally refers to a biological cell. A cell may be the basic structural, functional and/or biological unit of a living organism. A cell may originate from any organism having one or more cells. Some non-limiting examples include: a prokaryotic cell, eukaryotic cell, a bacterial cell, an archaeal cell, a cell of a single-cell eukaryotic organism, a protozoa cell, a cell from a plant (e.g., cells from plant crops, fruits, vegetables, grains, soy bean, corn, maize, wheat, seeds, tomatoes, rice, cassava, sugarcane, pumpkin, hay, potatoes, cotton, cannabis, tobacco, flowering plants, conifers, gymnosperms, ferns, clubmosses, hornworts, liverworts, mosses), an algal cell, (e.g., Botryococcus braunii, Chlamydomonas reinhardtii, Nannochloropsis gaditana, Chlorella pyrenoidosa, Sargassum patens C. Agardh, and the like), seaweeds (e.g., kelp), a fungal cell (e.g., a yeast cell, a cell from a mushroom), an animal cell, a cell from an invertebrate animal (e.g., fruit fly, cnidarian, echinoderm, nematode, etc.), a cell from a vertebrate animal (e.g., fish, amphibian, reptile, bird, mammal), a cell from a mammal (e.g., a pig, a cow, a goat, a sheep, a rodent, a rat, a mouse, a non-human primate, a human, etc.), and etcetera. Sometimes a cell is not originating from a natural organism (e.g., a cell can be a synthetically made, sometimes termed an artificial cell).

[0115] The term “nucleotide,” as used herein, generally refers to a base-sugar-phosphate combination. A nucleotide may comprise a synthetic nucleotide. A nucleotide may comprise a synthetic nucleotide analog. Nucleotides may be monomeric units of a nucleic acid sequence (e.g., deoxyribonucleic acid (DNA) and ribonucleic acid (RNA)). The term nucleotide may include ribonucleoside triphosphates adenosine triphosphate (ATP), uridine triphosphate (UTP), cytosine triphosphate (CTP), guanosine triphosphate (GTP) and deoxyribonucleoside triphosphates such as dATP, dCTP, dITP, dUTP, dGTP, dTTP, or derivatives thereof. Such derivatives may include, for example, [αS]dATP, 7-deaza-dGTP and 7-deaza-dATP, and nucleotide derivatives that confer nuclease resistance on the nucleic acid molecule containing them. The term nucleotide as used herein may refer to dideoxyribonucleoside triphosphates (ddNTPs) and their derivatives. Illustrative examples of dideoxyribonucleoside triphosphates may include, but are not limited to, ddATP, ddCTP, ddGTP, ddITP, and ddTTP. A nucleotide may be unlabeled or detectably labeled, such as using moieties comprising optically detectable moieties (e.g., fluorophores). Labeling may also be carried out with quantum dots. Detectable labels may include, for example, radioactive isotopes, fluorescent labels, chemiluminescent labels, bioluminescent labels and enzyme labels. Fluorescent labels of nucleotides may include but are not limited fluorescein, 5-carboxyfluorescein (FAM), 2′7′-dimethoxy-4′5-dichloro-6-carboxyfluorescein (JOE), rhodamine, 6-carboxyrhodamine (R6G), N,N,N′,N′-tetramethyl-6-carboxyrhodamine (TAMRA), 6-carboxy-X-rhodamine (ROX), 4-(4′dimethylaminophenylazo) benzoic acid (DABCYL), Cascade Blue, Oregon Green, Texas Red, Cyanine and 5-(2′-aminoethyl)aminonaphthalene-1-sulfonic acid (EDANS). Specific examples of fluorescently labeled nucleotides can include [R6G]dUTP, [TAMRA]dUTP, [R110]dCTP, [R6G]dCTP, [TAMRA]dCTP, [JOE]ddATP, [R6G]ddATP, [FAM]ddCTP, [R110]ddCTP, [TAMRA]ddGTP, [ROX]ddTTP, [dR6G]ddATP, [dR110]ddCTP, [dTAMRA]ddGTP, and [dROX]ddTTP available from Perkin Elmer, Foster City, Calif.; FluoroLink DeoxyNucleotides, FluoroLink Cy3-dCTP, FluoroLink Cy5-dCTP, FluoroLink Fluor X-dCTP, FluoroLink Cy3-dUTP, and FluoroLink Cy5-dUTP available from Amersham, Arlington Heights, Ill.; Fluorescein-15-dATP, Fluorescein-12-dUTP, Tetramethyl-rodamine-6-dUTP, IR770-9-dATP, Fluorescein-12-ddUTP, Fluorescein-12-UTP, and Fluorescein-15-2′-dATP available from Boehringer Mannheim, Indianapolis, Ind.; and Chromosome Labeled Nucleotides, BODIPY-FL-14-UTP, BODIPY-FL-4-UTP, BODIPY-TMR-14-UTP, BODIPY-TMR-14-dUTP, BODIPY-TR-14-UTP, BODIPY-TR-14-dUTP, Cascade Blue-7-UTP, Cascade Blue-7-dUTP, fluorescein-12-UTP, fluorescein-12-dUTP, Oregon Green 488-5-dUTP, Rhodamine Green-5-UTP, Rhodamine Green-5-dUTP, tetramethylrhodamine-6-UTP, tetramethylrhodamine-6-dUTP, Texas Red-5-UTP, Texas Red-5-dUTP, and Texas Red-12-dUTP available from Molecular Probes, Eugene, Oreg. Nucleotides can also be labeled or marked by chemical modification. A chemically-modified single nucleotide can be biotin-dNTP. Some non-limiting examples of biotinylated dNTPs can include, biotin-dATP (e.g., bio-N6-ddATP, biotin-14-dATP), biotin-dCTP (e.g., biotin-11-dCTP, biotin-14-dCTP), and biotin-dUTP (e.g., biotin-11-dUTP, biotin-16-dUTP, biotin-20-dUTP).

[0116] The terms “polynucleotide,” “oligonucleotide,” and “nucleic acid” are used interchangeably to generally refer to a polymeric form of nucleotides of any length, either deoxyribonucleotides or ribonucleotides, or analogs thereof, either in single-, double-, or multi-stranded form. A polynucleotide may be exogenous or endogenous to a cell. A polynucleotide may exist in a cell-free environment. A polynucleotide may be a gene or fragment thereof. A polynucleotide may be DNA. A polynucleotide may be RNA. A polynucleotide may have any three-dimensional structure and may perform any function. A polynucleotide may comprise one or more analogs (e.g., altered backbone, sugar, or nucleobase). If present, modifications to the nucleotide structure may be imparted before or after assembly of the polymer. Some non-limiting examples of analogs include: 5-bromouracil, peptide nucleic acid, xeno nucleic acid, morpholinos, locked nucleic acids, glycol nucleic acids, threose nucleic acids, dideoxynucleotides, cordycepin, 7-deaza-GTP, fluorophores (e.g., rhodamine or fluorescein linked to the sugar), thiol containing nucleotides, biotin linked nucleotides, fluorescent base analogs, CpG islands, methyl-7-guanosine, methylated nucleotides, inosine, thiouridine, pseudouridine, dihydrouridine, queuosine, and wyosine. Non-limiting examples of polynucleotides include coding or non-coding regions of a gene or gene fragment, loci (locus) defined from linkage analysis, exons, introns, messenger RNA (mRNA), transfer RNA (tRNA), ribosomal RNA (rRNA), short interfering RNA (siRNA), short-hairpin RNA (shRNA), micro-RNA (miRNA), ribozymes, cDNA, recombinant polynucleotides, branched polynucleotides, plasmids, vectors, isolated DNA of any sequence, isolated RNA of any sequence, cell-free polynucleotides including cell-free DNA (cfDNA) and cell-free RNA (cfRNA), nucleic acid probes, and primers. The sequence of nucleotides may be interrupted by non-nucleotide components.

[0117] The terms “transfection” or “transfected” generally refer to introduction of a nucleic acid into a cell by non-viral or viral-based methods. The nucleic acid molecules may be gene sequences encoding complete proteins or functional portions thereof. See, e.g., Sambrook et al., 1989, Molecular Cloning: A Laboratory Manual, 18.1-18.88.

[0118] The terms “peptide,” “polypeptide,” and “protein” are used interchangeably herein to generally refer to a polymer of at least two amino acid residues joined by peptide bond(s). This term does not connote a specific length of polymer, nor is it intended to imply or distinguish whether the peptide is produced using recombinant techniques, chemical or enzymatic synthesis, or is naturally occurring. The terms apply to naturally occurring amino acid polymers as well as amino acid polymers comprising at least one modified amino acid. In some cases, the polymer may be interrupted by non-amino acids. The terms include amino acid chains of any length, including full length proteins, and proteins with or without secondary and/or tertiary structure (e.g., domains). The terms also encompass an amino acid polymer that has been modified, for example, by disulfide bond formation, glycosylation, lipidation, acetylation, phosphorylation, oxidation, and any other manipulation such as conjugation with a labeling component. The terms “amino acid” and “amino acids,” as used herein, generally refer to natural and non-natural amino acids, including, but not limited to, modified amino acids and amino acid analogues. Modified amino acids may include natural amino acids and non-natural amino acids, which have been chemically modified to include a group or a chemical moiety not naturally present on the amino acid. Amino acid analogues may refer to amino acid derivatives. The term “amino acid” includes both D-amino acids and L-amino acids.

[0119] As used herein, the “non-native” can generally refer to a nucleic acid or polypeptide sequence that is not found in a native nucleic acid or protein. Non-native may refer to affinity tags. Non-native may refer to fusions. Non-native may refer to a naturally occurring nucleic acid or polypeptide sequence that comprises mutations, insertions and/or deletions. A non-native sequence may exhibit and/or encode for an activity (e.g., enzymatic activity, methyltransferase activity, acetyltransferase activity, kinase activity, ubiquitinating activity, etc.) that may also be exhibited by the nucleic acid and/or polypeptide sequence to which the non-native sequence is fused. A non-native nucleic acid or polypeptide sequence may be linked to a naturally-occurring nucleic acid or polypeptide sequence (or a variant thereof) by genetic engineering to generate a chimeric nucleic acid and/or polypeptide sequence encoding a chimeric nucleic acid and/or polypeptide.

[0120] The term “promoter”, as used herein, generally refers to the regulatory DNA region which controls transcription or expression of a gene and which may be located adjacent to or overlapping a nucleotide or region of nucleotides at which RNA transcription is initiated. A promoter may contain specific DNA sequences which bind protein factors, often referred to as transcription factors, which facilitate binding of RNA polymerase to the DNA leading to gene transcription. A ‘basal promoter’, also referred to as a ‘core promoter’, may generally refer to a promoter that contains all the basic necessary elements to promote transcriptional expression of an operably linked polynucleotide. Eukaryotic basal promoters typically, though not necessarily, contain a TATA-box and/or a CAAT box.

[0121] The term “expression”, as used herein, generally refers to the process by which a nucleic acid sequence or a polynucleotide is transcribed from a DNA template (such as into mRNA or other RNA transcript) and/or the process by which a transcribed mRNA is subsequently translated into peptides, polypeptides, or proteins. Transcripts and encoded polypeptides may be collectively referred to as “gene product.” If the polynucleotide is derived from genomic DNA, expression may include splicing of the mRNA in a eukaryotic cell.

[0122] As used herein, “operably linked”, “operable linkage”, “operatively linked”, or grammatical equivalents thereof generally refer to juxtaposition of genetic elements, e.g., a promoter, an enhancer, a polyadenylation sequence, etc., wherein the elements are in a relationship permitting them to operate in the expected manner. For instance, a regulatory element, which may comprise promoter and/or enhancer sequences, is operatively linked to a coding region if the regulatory element helps initiate transcription of the coding sequence. There may be intervening residues between the regulatory element and coding region so long as this functional relationship is maintained.

[0123] A “vector” as used herein, generally refers to a macromolecule or association of macromolecules that comprises or associates with a polynucleotide and which may be used to mediate delivery of the polynucleotide to a cell. Examples of vectors include plasmids, viral vectors, liposomes, and other gene delivery vehicles. The vector generally comprises genetic elements, e.g., regulatory elements, operatively linked to a gene to facilitate expression of the gene in a target.

[0124] As used herein, “an expression cassette” and “a nucleic acid cassette” are used interchangeably generally to refer to a combination of nucleic acid sequences or elements that are expressed together or are operably linked for expression. In some cases, an expression cassette refers to the combination of regulatory elements and a gene or genes to which they are operably linked for expression.

[0125] A “functional fragment” of a DNA or protein sequence generally refers to a fragment that retains a biological activity (either functional or structural) that is substantially similar to a biological activity of the full-length DNA or protein sequence. A biological activity of a DNA sequence may be its ability to influence expression in a manner known to be attributed to the full-length sequence.

[0126] As used herein, an “engineered” object generally indicates that the object has been modified by human intervention. According to non-limiting examples: a nucleic acid may be modified by changing its sequence to a sequence that does not occur in nature; a nucleic acid may be modified by ligating it to a nucleic acid that it does not associate with in nature such that the ligated product possesses a function not present in the original nucleic acid; an engineered nucleic acid may synthesized in vitro with a sequence that does not exist in nature; a protein may be modified by changing its amino acid sequence to a sequence that does not exist in nature; an engineered protein may acquire a new function or property. An “engineered” system comprises at least one engineered component.

[0127] As used herein, “synthetic” and “artificial” are used interchangeably to refer to a protein or a domain thereof that has low sequence identity (e.g., less than 50% sequence identity, less than 25% sequence identity, less than 10% sequence identity, less than 5% sequence identity, less than 1% sequence identity) to a naturally occurring human protein. For example, VPR and VP64 domains are synthetic transactivation domains.

[0128] The term “tracrRNA” or “tracr sequence”, as used herein, can generally refer to a nucleic acid with at least about 5%, 10%, 20%, 30%, 40%, 50%, 60%, 70%, 80%, 90%, 95%, or 100% sequence identity and/or sequence similarity to a wild type exemplary tracrRNA sequence (e.g., a tracrRNA from S. pyogenes S. aureus, etc.). tracrRNA can refer to a nucleic acid with at most about 5%, 10%, 20%, 30%, 40%, 50%, 60%, 70%, 80%, 90%, or 100% sequence identity and/or sequence similarity to a wild type exemplary tracrRNA sequence (e.g., a tracrRNA from S. pyogenes S. aureus, etc.). tracrRNA may refer to a modified form of a tracrRNA that can comprise a nucleotide change such as a deletion, insertion, or substitution, variant, mutation, or chimera. A tracrRNA may refer to a nucleic acid that can be at least about 60% identical to a wild type exemplary tracrRNA (e.g., a tracrRNA from S. pyogenes S. aureus, etc.) sequence over a stretch of at least 6 contiguous nucleotides. For example, a tracrRNA sequence can be at least about 60% identical, at least about 65% identical, at least about 70% identical, at least about 75% identical, at least about 80% identical, at least about 85% identical, at least about 90% identical, at least about 95% identical, at least about 98% identical, at least about 99% identical, or 100% identical to a wild type exemplary tracrRNA (e.g., a tracrRNA from S. pyogenes S. aureus, etc.) sequence over a stretch of at least 6 contiguous nucleotides. Type II tracrRNA sequences can be predicted on a genome sequence by identifying regions with complementarity to part of the repeat sequence in an adjacent CRISPR array.

[0129] As used herein, a “guide nucleic acid” can generally refer to a nucleic acid that may hybridize to another nucleic acid. A guide nucleic acid may be RNA. A guide nucleic acid may be DNA. The guide nucleic acid may be programmed to bind to a sequence of nucleic acid site-specifically. The nucleic acid to be targeted, or the target nucleic acid, may comprise nucleotides. The guide nucleic acid may comprise nucleotides. A portion of the target nucleic acid may be complementary to a portion of the guide nucleic acid. The strand of a double-stranded target polynucleotide that is complementary to and hybridizes with the guide nucleic acid may be called the complementary strand. The strand of the double-stranded target polynucleotide that is complementary to the complementary strand, and therefore may not be complementary to the guide nucleic acid may be called noncomplementary strand. A guide nucleic acid may comprise a polynucleotide chain and can be called a “single guide nucleic acid.” A guide nucleic acid may comprise two polynucleotide chains and may be called a “double guide nucleic acid.” If not otherwise specified, the term “guide nucleic acid” may be inclusive, referring to both single guide nucleic acids and double guide nucleic acids. A guide nucleic acid may comprise a segment that can be referred to as a “nucleic acid-targeting segment” or a “nucleic acid-targeting sequence.” A nucleic acid-targeting segment may comprise a sub-segment that may be referred to as a “protein binding segment” or “protein binding sequence” or “Cas protein binding segment”.

[0130] The term “sequence identity” or “percent identity” in the context of two or more nucleic acids or polypeptide sequences, generally refers to two (e.g., in a pairwise alignment) or more (e.g., in a multiple sequence alignment) sequences that are the same or have a specified percentage of amino acid residues or nucleotides that are the same, when compared and aligned for maximum correspondence over a local or global comparison window, as measured using a sequence comparison algorithm. Suitable sequence comparison algorithms for polypeptide sequences include, e.g., BLASTP using parameters of a wordlength (W) of 3, an expectation (E) of 10, and the BLOSUM62 scoring matrix setting gap costs at existence of 11, extension of 1, and using a conditional compositional score matrix adjustment for polypeptide sequences longer than 30 residues; BLASTP using parameters of a wordlength (W) of 2, an expectation (E) of 1000000, and the PAM30 scoring matrix setting gap costs at 9 to open gaps and 1 to extend gaps for sequences of less than 30 residues (these are the default parameters for BLASTP in the BLAST suite available at https://blast.ncbi.nlm.nih.gov); CLUSTALW with parameters of; the Smith-Waterman homology search algorithm with parameters of a match of 2, a mismatch of −1, and a gap of −1; MUSCLE with default parameters; MAFFT with parameters retree of 2 and maxiterations of 1000; Novafold with default parameters; HMMER hmmalign with default parameters.

[0131] As used herein, the term “RuvC_III domain” generally refers to a third discontinuous segment of a RuvC endonuclease domain (the RuvC nuclease domain being comprised of three discontiguous segments, RuvC_I, RuvC_II, and RuvC_III). A RuvC domain or segments thereof can generally be identified by alignment to known domain sequences, structural alignment to proteins with annotated domains, or by comparison to Hidden Markov Models (HMIs) built based on known domain sequences (e.g., Pfam HMM PF18541 for RuvC_III).

[0132] As used herein, the term “HNH domain” generally refers to an endonuclease domain having characteristic histidine and asparagine residues. An HNH domain can generally be identified by alignment to known domain sequences, structural alignment to proteins with annotated domains, or by comparison to Hidden Markov Models (HMIs) built based on known domain sequences (e.g., Pfam HMM PF01844 for domain HNH).

[0133] As used herein, the term “base editor” generally refers to an enzyme that catalyzes the conversion of one target base or base pair into another (e.g. A:T to G:C, C:G to T:A) without requiring the creation and repair of a double-strand break. In some embodiments, the base editor is a deaminase.

[0134] As used herein, the term “deaminase” generally refers to a protein or enzyme that catalyzes a deamination reaction. In some embodiments, the deaminase is an adenosine deaminase, which catalyzes the hydrolytic deamination of adenine or adenosine (e.g., an engineered adenosine deaminase that deaminates adenosine in DNA). In some embodiments, the deaminase or deaminase domain is a cytidine (or cytosine) deaminase, catalyzing the hydrolytic deamination of cytidine (or cytosine) or deoxycytidine to uridine (or uracil) or deoxyuridine, respectively. In some embodiments, the deaminase or deaminase domain is a cytidine (or cytosine) deaminase domain, catalyzing the hydrolytic deamination of cytosine (or cytosine) to uracil (or uridine). In some embodiments, the deaminase or deaminase domain is a naturally-occurring deaminase from an organism, such as a human, chimpanzee, gorilla, monkey, cow, dog, rat, mouse, or bacterium (e.g. E. coli). In some embodiments, the deaminase or deaminase domain is a variant of a naturally-occurring deaminase from an organism that does not occur in nature.

[0135] The term “optimally aligned” in the context of two or more nucleic acids or polypeptide sequences, generally refers to two (e.g., in a pairwise alignment) or more (e.g., in a multiple sequence alignment) sequences that have been aligned to maximal correspondence of amino acids residues or nucleotides, for example, as determined by the alignment producing a highest or “optimized” percent identity score.

[0136] Included in the current disclosure are variants of any of the enzymes described herein with one or more conservative amino acid substitutions. Such conservative substitutions can be made in the amino acid sequence of a polypeptide without disrupting the three-dimensional structure or function of the polypeptide. Conservative substitutions can be accomplished by substituting amino acids with similar hydrophobicity, polarity, and R chain length for one another. Additionally, or alternatively, by comparing aligned sequences of homologous proteins from different species, conservative substitutions can be identified by locating amino acid residues that have been mutated between species (e.g., non-conserved residues) without altering the basic functions of the encoded proteins. Such conservatively substituted variants may include variants with at least about 20%, at least about 25%, at least about 30%, at least about 35%, at least about 40%, at least about 45%, at least about 50%, at least about 55%, at least about 60%, at least about 65%, at least about 70%, at least about 75%, at least about 80%, at least about 85%, at least about 90%, at least about 91%, at least about 92%, at least about 93%, at least about 94%, at least about 95%, at least about 96%, at least about 97%, at least about 98%, at least about 99% identity to any one of the endonuclease protein sequences described herein. In some embodiments, such conservatively substituted variants are functional variants. Such functional variants can encompass sequences with substitutions such that the activity of one or more critical active site residues or guide RNA binding residues of the endonuclease are not disrupted.

[0137] Also included in the current disclosure are variants of any of the enzymes described herein with substitution of one or more catalytic residues to decrease or eliminate activity of the enzyme (e.g. decreased-activity variants). In some embodiments, a decreased activity variant as a protein described herein comprises a disrupting substitution of at least one, at least two, or all three catalytic residues. In some embodiments, any of the endonucleases described herein can comprise a nickase mutation. In some embodiments, any of the endonucleases described herein can comprise a RuvC domain lacking nuclease activity. In some embodiments, any of the endonucleases described herein can be configured to cleave one strand of a double-stranded target deoxyribonucleic acid. In some embodiments, any of the endonucleases described herein can comprise can be configured to lack endonuclease activity or be catalytically dead.

[0138] Conservative substitution tables providing functionally similar amino acids are available from a variety of references (see, for e.g., Creighton, Proteins: Structures and Molecular Properties (W H Freeman & Co.; 2nd edition (December 1993)). The following eight groups each contain amino acids that are conservative substitutions for one another:
[0139] 1) Alanine (A), Glycine (G);
[0140] 2) Aspartic acid (D), Glutamic acid (E);
[0141] 3) Asparagine (N), Glutamine (Q);
[0142] 4) Arginine (R), Lysine (K);
[0143] 5) Isoleucine (I), Leucine (L), Methionine (M), Valine (V);
[0144] 6) Phenylalanine (F), Tyrosine (Y), Tryptophan (W);
[0145] 7) Serine (S), Threonine (T); and
[0146] 8) Cysteine (C), Methionine (M)

[0147] Overview

[0148] The discovery of new Cas enzymes with unique functionality and structure may offer the potential to further disrupt deoxyribonucleic acid (DNA) editing technologies, improving speed, specificity, functionality, and ease of use. Relative to the predicted prevalence of Clustered Regularly Interspaced Short Palindromic Repeats (CRISPR) systems in microbes and the sheer diversity of microbial species, comparatively few functionally characterized CRISPR/Cas enzymes exist in the literature. This is partly because a huge number of microbial species may not be readily cultivated in laboratory conditions. Metagenomic sequencing from natural environmental niches that represent large numbers of microbial species may offer the potential to drastically increase the number of new CRISPR/Cas systems known and speed the discovery of new oligonucleotide editing functionalities. A recent example of the fruitfulness of such an approach is demonstrated by the 2016 discovery of CasX/CasY CRISPR systems from metagenomic analysis of natural microbial communities.

[0149] CRISPR/Cas systems are RNA-directed nuclease complexes that have been described to function as an adaptive immune system in microbes. In their natural context, CRISPR/Cas systems occur in CRISPR (clustered regularly interspaced short palindromic repeats) operons or loci, which generally comprise two parts: (i) an array of short repetitive sequences (30-40 bp) separated by equally short spacer sequences, which encode the RNA-based targeting element; and (ii) ORFs encoding the Cas encoding the nuclease polypeptide directed by the RNA-based targeting element alongside accessory proteins/enzymes. Efficient nuclease targeting of a particular target nucleic acid sequence generally requires both (i) complementary hybridization between the first 6-8 nucleic acids of the target (the target seed) and the crRNA guide; and (ii) the presence of a protospacer-adjacent motif (PAM) sequence within a defined vicinity of the target seed (the PAM usually being a sequence not commonly represented within the host genome). Depending on the exact function and organization of the system, CRISPR-Cas systems are commonly organized into 2 classes, 5 types and 16 subtypes based on shared functional characteristics and evolutionary similarity (see FIG. 1).

[0150] Class I CRISPR-Cas systems have large, multisubunit effector complexes, and comprise Types I, III, and IV.

[0151] Type I CRISPR-Cas systems are considered of moderate complexity in terms of components. In Type I CRISPR-Cas systems, the array of RNA-targeting elements is transcribed as a long precursor crRNA (pre-crRNA) that is processed at repeat elements to liberate short, mature crRNAs that direct the nuclease complex to nucleic acid targets when they are followed by a suitable short consensus sequence called a protospacer-adjacent motif (PAM). This processing occurs via an endoribonuclease subunit (Cash) of a large endonuclease complex called Cascade, which also comprises a nuclease (Cas3) protein component of the crRNA-directed nuclease complex. Cas I nucleases function primarily as DNA nucleases.

[0152] Type III CRISPR systems may be characterized by the presence of a central nuclease, known as Cas10, alongside a repeat-associated mysterious protein (RAMP) that comprises Csm or Cmr protein subunits. Like in Type I systems, the mature crRNA is processed from a pre-crRNA using a Cash-like enzyme. Unlike type I and II systems, type III systems appear to target and cleave DNA-RNA duplexes (such as DNA strands being used as templates for an RNA polymerase).

[0153] Type IV CRISPR-Cas systems possess an effector complex that consists of a highly reduced large subunit nuclease (csf1), two genes for RAMP proteins of the Cas5 (csf3) and Cas7 (csf2) groups, and, in some cases, a gene for a predicted small subunit; such systems are commonly found on endogenous plasmids.

[0154] Class II CRISPR-Cas systems generally have single-polypeptide multidomain nuclease effectors, and comprise Types II, V and VI.

[0155] Type II CRISPR-Cas systems are considered the simplest in terms of components. In Type II CRISPR-Cas systems, the processing of the CRISPR array into mature crRNAs does not require the presence of a special endonuclease subunit, but rather a small trans-encoded crRNA (tracrRNA) with a region complementary to the array repeat sequence; the tracrRNA interacts with both its corresponding effector nuclease (e.g. Cas9) and the repeat sequence to form a precursor dsRNA structure, which is cleaved by endogenous RNAse III to generate a mature effector enzyme loaded with both tracrRNA and crRNA. Cas II nucleases are known as DNA nucleases. Type 2 effectors generally exhibit a structure consisting of a RuvC-like endonuclease domain that adopts the RNase H fold with an unrelated HNH nuclease domain inserted within the folds of the RuvC-like nuclease domain. The RuvC-like domain is responsible for the cleavage of the target (e.g., crRNA complementary) DNA strand, while the HNH domain is responsible for cleavage of the displaced DNA strand.

[0156] Type V CRISPR-Cas systems are characterized by a nuclease effector (e.g. Cas12) structure similar to that of Type II effectors, comprising a RuvC-like domain. Similar to Type II, most (but not all) Type V CRISPR systems use a tracrRNA to process pre-crRNAs into mature crRNAs; however, unlike Type II systems which requires RNAse III to cleave the pre-crRNA into multiple crRNAs, type V systems are capable of using the effector nuclease itself to cleave pre-crRNAs. Like Type-II CRISPR-Cas systems, Type V CRISPR-Cas systems are again known as DNA nucleases. Unlike Type II CRISPR-Cas systems, some Type V enzymes (e.g., Cas12a) appear to have a robust single-stranded nonspecific deoxyribonuclease activity that is activated by the first crRNA directed cleavage of a double-stranded target sequence.

[0157] Type VI CRIPSR-Cas systems have RNA-guided RNA endonucleases. Instead of RuvC-like domains, the single polypeptide effector of Type VI systems (e.g. Cas13) comprises two HEPN ribonuclease domains. Differing from both Type II and V systems, Type VI systems also appear to not need a tracrRNA for processing of pre-crRNA into crRNA. Similar to type V systems, however, some Type VI systems (e.g., C2C2) appear to possess robust single-stranded nonspecific nuclease (ribonuclease) activity activated by the first crRNA directed cleavage of a target RNA.

[0158] Because of their simpler architecture, Class II CRISPR-Cas have been most widely adopted for engineering and development as designer nuclease/genome editing applications.

[0159] One of the early adaptations of such a system for in vitro use can be found in Jinek et al. (Science. 2012 Aug. 17; 337(6096):816-21, which is entirely incorporated herein by reference). The Jinek study first described a system that involved (i) recombinantly-expressed, purified full-length Cas9 (e.g., a Class II, Type II Cas enzyme) isolated from S. pyogenes SF370, (ii) purified mature ˜42 nt crRNA bearing a ˜20 nt 5′ sequence complementary to the target DNA sequence to be cleaved followed by a 3′ tracr-binding sequence (the whole crRNA being in vitro transcribed from a synthetic DNA template carrying a T7 promoter sequence); (iii) purified tracrRNA in vitro transcribed from a synthetic DNA template carrying a T7 promoter sequence, and (iv) Mg′. Jinek later described an improved, engineered system wherein the crRNA of (ii) is joined to the 5′ end of (iii) by a linker (e.g., GAAA) to form a single fused synthetic guide RNA (sgRNA) capable of directing Cas9 to a target by itself.

[0160] Mali et al. (Science. 2013 Feb. 15; 339(6121): 823-826), which is entirely incorporated herein by reference, later adapted this system for use in mammalian cells by providing DNA vectors encoding (i) an ORF encoding codon-optimized Cas9 (e.g., a Class II, Type II Cas enzyme) under a suitable mammalian promoter with a C-terminal nuclear localization sequence (e.g., SV40 NLS) and a suitable polyadenylation signal (e.g., TK pA signal); and (ii) an ORF encoding an sgRNA (having a 5′ sequence beginning with G followed by 20 nt of a complementary targeting nucleic acid sequence joined to a 3′ tracr-binding sequence, a linker, and the tracrRNA sequence) under a suitable Polymerase III promoter (e.g., the U6 promoter).

[0161] Base Editing

[0162] Base editing is the conversion of one target base or base pair into another (e.g. A:T to G:C, C:G to T:A) without requiring the creation and repair of a double-strand break. The base editing may be achieved with the help of DNA and RNA base editors that allow the introduction of point mutations at specific sites, in either DNA or RNA. Generally, DNA base editors may comprise a fusion of a catalytically inactive nuclease and a catalytically active base-modification enzyme that acts only on single-stranded DNAs (ssDNAs). RNA base editors may comprise of similar, RNA-specific enzymes. Base editing may increase the efficiency of gene modification, while reducing the off-target and random mutations in the DNA.

[0163] DNA base editors are engineered ribonucleoprotein complexes that act as tools for single base substitution in cells and organism. They may be created by fusing an engineered base-modification enzyme and a catalytically deficient Cas variant that cannot cut dsDNA, but it is able to unfold the dsDNA in a protospacer adjacent motif (PAM) sequence-dependent manner, such that a guide RNA can find its complementary target to indicate a ssDNA scission site. The guide RNA anneals to the complementary DNA, displacing a fragment of ssDNA and directing the Cas ‘scissors’ to the base modification site. The cellular repair machinery will repair the nicked non-edited strand using information from the complementary edited template.

[0164] So far, two types of DNA editors, cytosine base (CBEs) and adenine base editors (ABEs) have been developed. They were shown to efficiently and precisely edit point mutations in DNA with minimal off-target DNA editing (see Nat Biotechnol. 2017; 35:435-437, Nat Biotechnol. 2017; 35:438-440 and Nat Biotechnol. 2017; 35:475-480, each of which is entirely incorporated herein by reference). However, recent findings indicate that off-target modifications are present in DNA, and that many off-target modifications are also introduced into RNA by DNA base editors.

[0165] MG Base Editors

[0166] In some aspects, the present disclosure provides for an engineered nucleic acid editing system, comprising: (a) an endonuclease comprising a RuvC domain and an HNH domain, wherein the endonuclease is derived from an uncultivated microorganism, wherein the endonuclease is a class 2, type II Cas endonuclease, and wherein the endonuclease is configured to be deficient in nuclease activity; (b) a base editor coupled to the endonuclease; and (c) an engineered guide ribonucleic acid structure configured to form a complex with the endonuclease comprising: (i) a guide ribonucleic acid sequence configured to hybridize to a target deoxyribonucleic acid sequence; and (ii) a ribonucleic acid sequence configured to bind to the endonuclease. In some embodiments, the endonuclease comprises a sequence with at least 80%, at least 81%, at least 82%, at least 83%, at least 84%, at least 85%, at least 86%, at least 87%, at least 88%, at least 89%, at least 90%, at least 91%, at least 92%, at least 93%, at least 94%, at least 95%, at least 96%, at least 97%, at least 98%, at least 99%, or 100% sequence identity to any one of SEQ ID NOs:70-78 or 597 or a variant thereof. In some cases, the RuvC domain lacks nuclease activity. In some cases, the endonuclease comprises a nickase mutation. In some cases, the endonuclease is configured to cleave one strand of a double-stranded target deoxyribonucleic acid. In some cases the ribonucleic acid sequence configured to bind to the endonuclease comprises a tracr sequence.

[0167] In some aspects, the present disclosure provides for an engineered nucleic acid editing system comprising: (a) an endonuclease having at least 80%, at least 81%, at least 82%, at least 83%, at least 84%, at least 85%, at least 86%, at least 87%, at least 88%, at least 89%, at least 90%, at least 91%, at least 92%, at least 93%, at least 94%, at least 95%, at least 96%, at least 97%, at least 98%, at least 99%, or 100% sequence identity to any one of SEQ ID NOs:70-78 or 597 or a variant thereof, wherein the endonuclease is configured to be deficient in nuclease activity; a base editor coupled to the endonuclease; and an engineered guide ribonucleic acid structure configured to form a complex with the endonuclease comprising: (i) a guide ribonucleic acid sequence configured to hybridize to a target deoxyribonucleic acid sequence; and (ii) a ribonucleic acid sequence configured to bind to the endonuclease. In some cases the ribonucleic acid sequence configured to bind to the endonuclease comprises a tracr sequence. In some cases, the RuvC domain lacks nuclease activity. In some cases, the endonuclease comprises a nickase mutation. In some cases, the endonuclease is configured to cleave one strand of a double-stranded target deoxyribonucleic acid.

[0168] In some aspects, the present disclosure provides for an engineered nucleic acid editing system comprising: (a) an endonuclease configured to bind to a protospacer adjacent motif (PAM) sequence comprising any one of SEQ ID NOs: 360-368 or 598, wherein the endonuclease is a class 2, type II Cas endonuclease, and the endonuclease is configured to be deficient in nuclease activity; and (b) a base editor coupled to the endonuclease; and (c) an engineered guide ribonucleic acid structure configured to form a complex with the endonuclease comprising: (i) a guide ribonucleic acid sequence configured to hybridize to a target deoxyribonucleic acid sequence; and (ii) a ribonucleic acid sequence configured to bind to the endonuclease. In some cases, the ribonucleic acid sequence configured to bind to the endonuclease comprises a tracr sequence. In some cases, the endonuclease comprises a nickase mutation. In some cases, the RuvC domain lacks nuclease activity. In some cases, the endonuclease is configured to cleave one strand of a double-stranded target deoxyribonucleic acid.

[0169] In some embodiments, the endonuclease is derived from an uncultivated microorganism. In some embodiments, the endonuclease has less than 80% identity to a Cas9 endonuclease. In some embodiments, the endonuclease further comprises an HNH domain. In some embodiments, the tracr ribonucleic acid sequence comprises a sequence with at least 80%, at least 81%, at least 82%, at least 83%, at least 84%, at least 85%, at least 86%, at least 87%, at least 88%, at least 89%, at least 90%, at least 91%, at least 92%, at least 93%, at least 94%, at least 95%, at least 96%, at least 97%, at least 98%, at least 99%, or 100% sequence identity to about 60 to 90 consecutive nucleotides selected from any one of SEQ ID NOs: 88-96 or 488-489 or a variant thereof. In some embodiments, the tracr ribonucleic acid sequence comprises a sequence with at least 80%, at least 81%, at least 82%, at least 83%, at least 84%, at least 85%, at least 86%, at least 87%, at least 88%, at least 89%, at least 90%, at least 91%, at least 92%, at least 93%, at least 94%, at least 95%, at least 96%, at least 97%, at least 98%, at least 99%, or 100% sequence identity non-degenerate nucleotides of any one of SEQ ID NOs: 88-96 or 488-489 or a variant thereof.

[0170] In some aspects, the present disclosure provides an engineered nucleic acid editing system comprising, (a) an engineered guide ribonucleic acid structure comprising: (i) a guide ribonucleic acid sequence configured to hybridize to a target deoxyribonucleic acid sequence; and (ii) a tracr ribonucleic acid sequence configured to bind to an endonuclease, wherein the tracr ribonucleic acid sequence comprises a sequence with at least 80%, at least 81%, at least 82%, at least 83%, at least 84%, at least 85%, at least 86%, at least 87%, at least 88%, at least 89%, at least 90%, at least 91%, at least 92%, at least 93%, at least 94%, at least 95%, at least 96%, at least 97%, at least 98%, at least 99%, or 100% sequence identity non-degenerate nucleotides of any one of SEQ ID NOs: 88-96 or 488-489 or a variant thereof; and a class 2, type II Cas endonuclease configured to bind to the engineered guide ribonucleic acid.

[0171] In some embodiments, the endonuclease is configured to bind to a protospacer adjacent motif (PAM) sequence comprising any one of SEQ ID NOs: 360, 362, or 368. In some embodiments, the base editor comprises a sequence with at least 80%, at least 81%, at least 82%, at least 83%, at least 84%, at least 85%, at least 86%, at least 87%, at least 88%, at least 89%, at least 90%, at least 91%, at least 92%, at least 93%, at least 94%, at least 95%, at least 96%, at least 97%, at least 98%, at least 99%, or 100% sequence identity to any one of SEQ ID NOs: 1-51, 57-66, 385-443, 444-475, or 594-595 or a variant thereof. In some embodiments, the base editor is an adenine deaminase. In some embodiments, the adenosine deaminase comprises a sequence with at least 80%, at least 81%, at least 82%, at least 83%, at least 84%, at least 85%, at least 86%, at least 87%, at least 88%, at least 89%, at least 90%, at least 91%, at least 92%, at least 93%, at least 94%, at least 95%, at least 96%, at least 97%, at least 98%, at least 99%, or 100% sequence identity to SEQ ID NOs: 50-51, 57, 385-443, 448-475, or 595 or a variant thereof. In some embodiments, the base editor is a cytosine deaminase. In some embodiments, the cytosine deaminase comprises a sequence with at least 80%, at least 81%, at least 82%, at least 83%, at least 84%, at least 85%, at least 86%, at least 87%, at least 88%, at least 89%, at least 90%, at least 91%, at least 92%, at least 93%, at least 94%, at least 95%, at least 96%, at least 97%, at least 98%, at least 99%, or 100% sequence identity to any one of SEQ ID NOs: 1-49, 444-447, 594, or 58-66 or a variant thereof.

[0172] In some embodiments, the engineered nucleic acid editing system further comprises a uracil DNA glycosylase inhibitor. In some embodiments, the uracil DNA glycosylase inhibitor comprises a sequence with at least 80%, at least 81%, at least 82%, at least 83%, at least 84%, at least 85%, at least 86%, at least 87%, at least 88%, at least 89%, at least 90%, at least 91%, at least 92%, at least 93%, at least 94%, at least 95%, at least 96%, at least 97%, at least 98%, at least 99%, or 100% sequence identity to any one of SEQ ID NOs: 52-56 or SEQ ID NO: 67 or a variant thereof.

[0173] In some embodiments, the engineered guide ribonucleic acid structure comprises at least two ribonucleic acid polynucleotides. In some embodiments, the engineered guide ribonucleic acid structure comprises one ribonucleic acid polynucleotide comprising the guide ribonucleic acid sequence and the tracr ribonucleic acid sequence. In some embodiments, the guide ribonucleic acid sequence is complementary to a prokaryotic, bacterial, archaeal, eukaryotic, fungal, plant, mammalian, or human genomic sequence. In some embodiments, the guide ribonucleic acid sequence is 15-24 nucleotides in length. In some embodiments, the endonuclease comprises one or more nuclear localization sequences (NLSs) proximal to an N- or C-terminus of the endonuclease.

[0174] The NLS can comprise any of the sequences in Table 1 below, or a combination thereof:

TABLE 1
Example NLS Sequences that can be used with Cas Effectors According to the
Disclosure

| Source | NLS amino acid sequence | SEQ ID NO: |
|---|---|---|
| SV40 | PKKKRKV | 369 |
| nucleoplasmin bipartite NLS | KRPAATKKAGQAKKKK | 370 |
| c-myc NLS | PAAKRVKLD | 371 |
| c-myc NLS | RQRRNELKRSP | 372 |
| hRNPA1 M9 NLS | NQSSNFGPMKGGNFGGRSSGPYGGGGQYFAKPRNQG | 373 |
| | GY | |
| Importin-alpha IBB domain | RMRIZFKNKGKDTAELRRRRVEVSVELRKAKKDEQIL | 374 |
| | KRRNV | |
| Myoma T protein | VSRKRPRP | 375 |
| Myoma T protein | PPKKARED | 376 |
| p53 | PQPKKKPL | 377 |
| mouse c-abl IV | SALIKKKKKMAP | 378 |
| influenza virus NS1 | DRLRR | 379 |
| influenza virus NS1 | PKQKKRK | 380 |
| Hepatitis virus delta antigen | RKLKKKIKKL | 381 |
| mouse Mx1 protein | REKKKFLKRR | 382 |
| human poly(ADP-ribose) | KRKGDEVDGVDEVAKKKSKK | 383 |
| polymerase | | |
| steroid hormone receptor | RKCLQAGMNLEARKTKK | 384 |
| (human) glucocorticoid | | |

[0175] In some embodiments, the endonuclease is covalently coupled directly to the base editor or covalently coupled to the base editor through a linker. In some embodiments, linkers joining any of the enzymes or domains described herein can comprise one or multiple copies of a sequence having at least 80%, at least 81%, at least 82%, at least 83%, at least 84%, at least 85%, at least 86%, at least 87%, at least 88%, at least 89%, at least 90%, at least 91%, at least 92%, at least 93%, at least 94%, at least 95%, at least 96%, at least 97%, at least 98%, at least 99%, or 100% sequence identity to SGGSSGGSSGSETPGTSESATPESSGGSSGGS, SGSETPGTSESATPESA, GSGGS, SGSETPGTSESATPES, SGGSS, or GAAA, or any other linker sequence described herein. In some embodiments, a polypeptide comprises the endonuclease and the base editor. In some embodiments, the endonuclease is configured to cleave one strand of a double-stranded target deoxyribonucleic acid. In some embodiments, the endonuclease comprises a sequence having at least 80%, at least 81%, at least 82%, at least 83%, at least 84%, at least 85%, at least 86%, at least 87%, at least 88%, at least 89%, at least 90%, at least 91%, at least 92%, at least 93%, at least 94%, at least 95%, at least 96%, at least 97%, at least 98%, at least 99%, or 100% sequence identity to any one of SEQ ID NOs:70-78 or 597 or a variant thereof. In some embodiments, the system further comprises a source of Mg²⁺.

[0176] In some embodiments, the endonuclease comprises a sequence at least 70%, at least 80%, or at least 90% identical to SEQ ID NO: 70 or a variant thereof; the guide RNA structure comprises a sequence at least 70%, at least 80%, or at least 90% identical to at least one of SEQ ID NO: 88; and the endonuclease is configured to bind to a PAM comprising SEQ ID NO: 360.

[0177] In some embodiments, the endonuclease comprises a sequence at least 70%, at least 80%, or at least 90% identical to SEQ ID NO: 71 or a variant thereof; the guide RNA structure comprises a sequence at least 70%, at least 80%, or at least 90% identical to at least one of SEQ ID NO: 89; and the endonuclease is configured to bind to a PAM comprising SEQ ID NO: 361.

[0178] In some embodiments, the endonuclease comprises a sequence at least 70%, at least 80%, or at least 90% identical to SEQ ID NO: 73 or a variant thereof; the guide RNA structure comprises a sequence at least 70%, at least 80%, or at least 90% identical to at least one of SEQ ID NO: 91; and the endonuclease is configured to bind to a PAM comprising SEQ ID NO: 363.

[0179] In some embodiments, the endonuclease comprises a sequence at least 70%, at least 80%, or at least 90% identical to SEQ ID NO: 75 or a variant thereof; the guide RNA structure comprises a sequence at least 70%, at least 80%, or at least 90% identical to at least one of SEQ ID NO: 93; and the endonuclease is configured to bind to a PAM comprising SEQ ID NO: 365.

[0180] In some embodiments, the endonuclease comprises a sequence at least 70%, at least 80%, or at least 90% identical to SEQ ID NO: 76 or a variant thereof; the guide RNA structure comprises a sequence at least 70%, at least 80%, or at least 90% identical to at least one of SEQ ID NO: 94; and the endonuclease is configured to bind to a PAM comprising SEQ ID NO: 366.

[0181] In some embodiments, the endonuclease comprises a sequence at least 70%, at least 80%, or at least 90% identical to SEQ ID NO: 77 or a variant thereof; the guide RNA structure comprises a sequence at least 70%, at least 80%, or at least 90% identical to at least one of SEQ ID NO: 95; and the endonuclease is configured to bind to a PAM comprising SEQ ID NO: 367.

[0182] In some embodiments, the endonuclease comprises a sequence at least 70%, at least 80%, or at least 90% identical to SEQ ID NO: 78 or a variant thereof; the guide RNA structure comprises a sequence at least 70%, at least 80%, or at least 90% identical to at least one of SEQ ID NO: 96; and the endonuclease is configured to bind to a PAM comprising SEQ ID NO: 368.

[0183] In some embodiments, the base editor comprises an adenine deaminase. In some embodiments, the adenine deaminase comprises SEQ ID NO: 57 or a variant thereof. In some embodiments, the base editor comprises a cytosine deaminase. In some embodiments, the cytosine deaminase comprises SEQ ID NO: 58 or a variant thereof. In some embodiments, the engineered nucleic acid editing system described herein further comprises a uracil DNA glycosylation inhibitor. In some embodiments, the uracil DNA glycosylation inhibitor comprises SEQ ID NO: 67 or a variant thereof.

[0184] In some embodiments, the sequence identity is determined by a BLASTP, CLUSTALW, MUSCLE, MAFFT, or Smith-Waterman homology search algorithm. In some embodiments, the sequence identity is determined by said BLASTP homology search algorithm using parameters of a wordlength (W) of 3, an expectation (E) of 10, and a BLOSUM62 scoring matrix setting gap costs at existence of 11, extension of 1, and using a conditional compositional score matrix adjustment.

[0185] In some aspects, the present disclosure provides a nucleic acid comprising an engineered nucleic acid sequence optimized for expression in an organism, wherein the nucleic acid encodes a class 2, type II Cas endonuclease coupled to a base editor, and wherein the endonuclease is derived from an uncultivated microorganism.

[0186] In some aspects, the present disclosure provides a nucleic acid comprising an engineered nucleic acid sequence optimized for expression in an organism, wherein the nucleic acid encodes an endonuclease having at least 70%, at least 80%, at least 81%, at least 82%, at least 83%, at least 84%, at least 85%, at least 86%, at least 87%, at least 88%, at least 89%, at least 90%, at least 91%, at least 92%, at least 93%, at least 94%, at least 95%, at least 96%, at least 97%, at least 98%, at least 99%, or 100% sequence identity to any one of SEQ ID NOs:70-78 or 597 or a variant thereof coupled to a base editor. In some embodiments, the endonuclease comprises a sequence encoding one or more nuclear localization sequences (NLSs) proximal to an N- or C-terminus of said endonuclease. In some embodiments, the organism is prokaryotic, bacterial, eukaryotic, fungal, plant, mammalian, rodent, or human.

[0187] In some aspects, the present disclosure provides a vector comprising a nucleic acid sequence encoding a class 2, type II Cas endonuclease coupled to a base editor, wherein said endonuclease is derived from an uncultivated microorganism. In some embodiments, the vector comprises the nucleic acid described herein. In some embodiments, the vector further comprises a nucleic acid encoding an engineered guide ribonucleic acid structure configured to form a complex with the endonuclease comprising: a guide ribonucleic acid sequence configured to hybridize to a target deoxyribonucleic acid sequence; and a tracr ribonucleic acid sequence configured to binding to the endonuclease. In some embodiments, the vector is a plasmid, a minicircle, a CELiD, an adeno-associated virus (AAV) derived virion, or a lentivirus. In some aspects, the present disclosure provides a cell comprising the vector described herein. In some aspects, the present disclosure provides a method of manufacturing an endonuclease, comprising cultivating the cell described herein.

[0188] In some aspects, the present disclosure provides a method for modifying a double-stranded deoxyribonucleic acid polynucleotide comprising contacting the double-stranded deoxyribonucleic acid polynucleotide with a complex comprising: an endonuclease comprising a RuvC domain and an HNH domain, wherein the endonuclease is derived from an uncultivated microorganism, wherein the endonuclease is a class 2, type II Cas endonuclease, and wherein the RuvC domain lacks nuclease activity; a base editor coupled to the endonuclease; and an engineered guide ribonucleic acid structure configured to bind to the endonuclease and the double-stranded deoxyribonucleic acid polynucleotide; wherein the double-stranded deoxyribonucleic acid polynucleotide comprises a protospacer adjacent motif (PAM).

[0189] In some embodiments, the endonuclease comprising a RuvC domain and an HNH domain is covalently coupled directly to the base editor or covalently coupled to the base editor through a linker. In some embodiments, the endonuclease comprising a RuvC domain and an HNH domain comprises a sequence with at least 80%, at least 81%, at least 82%, at least 83%, at least 84%, at least 85%, at least 86%, at least 87%, at least 88%, at least 89%, at least 90%, at least 91%, at least 92%, at least 93%, at least 94%, at least 95%, at least 96%, at least 97%, at least 98%, at least 99%, or 100% sequence identity to any one of SEQ ID NOs:70-78 or 597 or a variant thereof.

[0190] In some aspects, the present disclosure provides a method for modifying a double-stranded deoxyribonucleic acid polynucleotide, comprising contacting the double-stranded deoxyribonucleic acid polynucleotide with a complex comprising: a class 2, type II Cas endonuclease, a base editor coupled to the endonuclease, and an engineered guide ribonucleic acid structure configured to bind to the endonuclease and the double-stranded deoxyribonucleic acid polynucleotide; wherein the double-stranded deoxyribonucleic acid polynucleotide comprises a protospacer adjacent motif (PAM); and wherein the PAM comprises a sequence selected from the group consisting of SEQ ID NOs: 360-368 or 598 or a variant thereof.

[0191] In some embodiments, the class 2, type II Cas endonuclease is covalently coupled to the base editor or coupled to the base editor through a linker. In some embodiments, the base editor comprises a sequence with at least 80%, at least 81%, at least 82%, at least 83%, at least 84%, at least 85%, at least 86%, at least 87%, at least 88%, at least 89%, at least 90%, at least 91%, at least 92%, at least 93%, at least 94%, at least 95%, at least 96%, at least 97%, at least 98%, at least 99%, or 100% sequence identity to a sequence selected from SEQ ID NOs: 1-51, 57-66, 385-443, 444-475, or 594-595 or a variant thereof. In some embodiments, the base editor comprises an adenine deaminase; the double-stranded deoxyribonucleic acid polynucleotide comprises an adenine; and modifying the double-stranded deoxyribonucleic acid polypeptide comprises converting the adenine to guanine. In some embodiments, the adenine deaminase comprises a sequence with at least 95% identity to SEQ ID NO: 57 or a variant thereof.

[0192] In some embodiments, the base editor comprises a cytosine deaminase; the double-stranded deoxyribonucleic acid polynucleotide comprises a cytosine; and modifying the double-stranded deoxyribonucleic acid polypeptide comprises converting the cytosine to uracil. In some embodiments, the cytosine deaminase comprises a sequence with at least 95% identity to SEQ ID NO: 58 or a variant thereof. In some embodiments, the cytosine deaminase comprises a sequence with at least 95% identity to any one of SEQ ID NOs: 59-66 or a variant thereof.

[0193] In some embodiments, the complex further comprises a uracil DNA glycosylase inhibitor. In some embodiments, the uracil DNA glycosylase inhibitor comprises a sequence with at least 70%, 80%, 90% or 95% identity to any one of SEQ ID NOs: 52-56 or SEQ ID NO: 67 or a variant thereof. In some embodiments, the double-stranded deoxyribonucleic acid polynucleotide comprises a first strand comprising a sequence complementary to a sequence of the engineered guide ribonucleic acid structure and a second strand comprising said PAM. In some embodiments, the PAM is directly adjacent to the 3′ end of the sequence complementary to the sequence of the engineered guide ribonucleic acid structure.

[0194] In some embodiments, the class 2, type II Cas endonuclease is not a Cas9 endonuclease, a Cas14 endonuclease, a Cas12a endonuclease, a Cas12b endonuclease, a Cas 12c endonuclease, a Cas12d endonuclease, a Cas12e endonuclease, a Cas13a endonuclease, a Cas13b endonuclease, a Cas13c endonuclease, or a Cas 13d endonuclease. In some embodiments, the class 2, type II Cas endonuclease is derived from an uncultivated microorganism. In some embodiments, the double-stranded deoxyribonucleic acid polynucleotide is a eukaryotic, plant, fungal, mammalian, rodent, or human double-stranded deoxyribonucleic acid polynucleotide.

[0195] In some aspects, the present disclosure provides a method of modifying a target nucleic acid locus, said method comprising delivering to said target nucleic acid locus the engineered nucleic acid editing system described herein, wherein the endonuclease is configured to form a complex with the engineered guide ribonucleic acid structure, and wherein the complex is configured such that upon binding of the complex to the target nucleic acid locus, the complex modifies a nucleotide of the target nucleic locus.

[0196] In some embodiments, the engineered nucleic acid editing system comprises an adenine deaminase, the nucleotide is an adenine, and modifying the target nucleic acid locus comprises converting the adenine to a guanine. In some embodiments, the engineered nucleic acid editing system comprises a cytidine deaminase and a uracil DNA glycosylase inhibitor, the nucleotide is a cytosine and modifying the target nucleic acid locus comprises converting the adenine to a uracil. In some embodiments, the target nucleic acid locus comprises genomic DNA, viral DNA, or bacterial DNA. In some embodiments, the target nucleic acid locus is in vitro. In some embodiments, the target nucleic acid locus is within a cell. In some embodiments, the cell is a prokaryotic cell, a bacterial cell, a eukaryotic cell, a fungal cell, a plant cell, an animal cell, a mammalian cell, a rodent cell, a primate cell, or a human cell. In some embodiments, the cell is within an animal.

[0197] In some embodiments, the cell is within a cochlea. In some embodiments, the cell is within an embryo. In some embodiments, the embryo is a two-cell embryo. In some embodiments, the embryo is a mouse embryo. In some embodiments, delivering the engineered nucleic acid editing system to the target nucleic acid locus comprises delivering the nucleic acid described herein or the vector described herein. In some embodiments, delivering the engineered nucleic acid editing system to the target nucleic acid locus comprises delivering a nucleic acid comprising an open reading frame encoding the endonuclease.

[0198] In some embodiments, the nucleic acid comprises a promoter to which the open reading frame encoding the endonuclease is operably linked. In some embodiments, delivering the engineered nucleic acid editing system to said target nucleic acid locus comprises delivering a capped mRNA containing the open reading frame encoding the endonuclease. In some embodiments, delivering the engineered nucleic acid editing system to the target nucleic acid locus comprises delivering a translated polypeptide. In some embodiments, delivering the engineered nucleic acid editing system to the target nucleic acid locus comprises delivering a deoxyribonucleic acid (DNA) encoding the engineered guide ribonucleic acid structure operably linked to a ribonucleic acid (RNA) pol III promoter.

[0199] In some aspects, the present disclosure provides an engineered nucleic acid editing polypeptide, comprising: an endonuclease comprising a RuvC domain and an HNH domain, wherein the endonuclease is derived from an uncultivated microorganism, wherein the endonuclease is a class 2, type II Cas endonuclease, and wherein the endonuclease is configured to be deficient in nuclease activity. In some embodiments, the endonuclease comprises a sequence with at least 80%, at least 81%, at least 82%, at least 83%, at least 84%, at least 85%, at least 86%, at least 87%, at least 88%, at least 89%, at least 90%, at least 91%, at least 92%, at least 93%, at least 94%, at least 95%, at least 96%, at least 97%, at least 98%, at least 99%, or 100% sequence identity to any one of SEQ ID NOs:70-78 or 597 or a variant thereof.

[0200] In some aspects, the present disclosure provides an engineered nucleic acid editing polypeptide, comprising: an endonuclease having at least 80%, at least 81%, at least 82%, at least 83%, at least 84%, at least 85%, at least 86%, at least 87%, at least 88%, at least 89%, at least 90%, at least 91%, at least 92%, at least 93%, at least 94%, at least 95%, at least 96%, at least 97%, at least 98%, at least 99%, or 100% sequence identity to any one of SEQ ID NOs:70-78 or 597 or a variant thereof, wherein the endonuclease is configured to be deficient in nuclease activity; and a base editor coupled to the endonuclease.

[0201] In some aspects, the present disclosure provides an engineered nucleic acid editing polypeptide, comprising: an endonuclease configured to bind to a protospacer adjacent motif (PAM) sequence comprising any one of SEQ ID NOs: 360-368 or 598, wherein the endonuclease is a class 2, type II Cas endonuclease, and wherein the endonuclease is configured to be deficient in nuclease activity; and a base editor coupled to the endonuclease.

[0202] In some embodiments, the endonuclease is derived from an uncultivated microorganism. In some embodiments, the endonuclease has less than 80% identity to a Cas9 endonuclease. In some embodiments, the endonuclease further comprises an HNH domain. In some embodiments, the ribonucleic acid sequence configured to bind the endonuclease comprises a sequence with at least 80%, at least 81%, at least 82%, at least 83%, at least 84%, at least 85%, at least 86%, at least 87%, at least 88%, at least 89%, at least 90%, at least 91%, at least 92%, at least 93%, at least 94%, at least 95%, at least 96%, at least 97%, at least 98%, at least 99%, or 100% sequence identity to about 60 to 90 consecutive nucleotides selected from any one of SEQ ID NOs: 88-96 or 488-489 or a variant thereof. In some embodiments, the ribonucleic acid sequence configured to bind the endonuclease comprises a sequence with at least 80%, at least 81%, at least 82%, at least 83%, at least 84%, at least 85%, at least 86%, at least 87%, at least 88%, at least 89%, at least 90%, at least 91%, at least 92%, at least 93%, at least 94%, at least 95%, at least 96%, at least 97%, at least 98%, at least 99%, or 100% sequence identity to non-degenerate nucleotides of any one of SEQ ID NOs: 88-96 or 488-489 or a variant thereof. In some embodiments, the base editor comprises a sequence with at least 70%, at least 80%, at least 81%, at least 82%, at least 83%, at least 84%, at least 85%, at least 86%, at least 87%, at least 88%, at least 89%, at least 90%, at least 91%, at least 92%, at least 93%, at least 94%, at least 95%, at least 96%, at least 97%, at least 98%, at least 99%, or 100% sequence identity to any one of SEQ ID NOs:70-78 or 597 or a variant thereof. In some embodiments, the base editor is an adenine deaminase. In some embodiments, the adenosine deaminase comprises a sequence with at least 80%, at least 81%, at least 82%, at least 83%, at least 84%, at least 85%, at least 86%, at least 87%, at least 88%, at least 89%, at least 90%, at least 91%, at least 92%, at least 93%, at least 94%, at least 95%, at least 96%, at least 97%, at least 98%, at least 99%, or 100% sequence identity to any one of SEQ ID NOs: 50-51, 57, 385-443, 448-475, or 595 or a variant thereof. In some embodiments, the base editor is a cytosine deaminase. In some embodiments, the cytosine deaminase comprises a sequence with at least 80%, at least 81%, at least 82%, at least 83%, at least 84%, at least 85%, at least 86%, at least 87%, at least 88%, at least 89%, at least 90%, at least 91%, at least 92%, at least 93%, at least 94%, at least 95%, at least 96%, at least 97%, at least 98%, at least 99%, or 100% sequence identity to any one of SEQ ID NOs: 1-49, 444-447, 594, or 58-66 or a variant thereof.

[0203] Systems of the present disclosure may be used for various applications, such as, for example, nucleic acid editing (e.g., gene editing), binding to a nucleic acid molecule (e.g., sequence-specific binding). Such systems may be used, for example, for addressing (e.g., removing or replacing) a genetically inherited mutation that may cause a disease in a subject, inactivating a gene in order to ascertain its function in a cell, as a diagnostic tool to detect disease-causing genetic elements (e.g. via cleavage of reverse-transcribed viral RNA or an amplified DNA sequence encoding a disease-causing mutation), as deactivated enzymes in combination with a probe to target and detect a specific nucleotide sequence (e.g. sequence encoding antibiotic resistance int bacteria), to render viruses inactive or incapable of infecting host cells by targeting viral genomes, to add genes or amend metabolic pathways to engineer organisms to produce valuable small molecules, macromolecules, or secondary metabolites, to establish a gene drive element for evolutionary selection, to detect cell perturbations by foreign small molecules and nucleotides as a biosensor.

TABLE 2
Sequence Listing of Protein and Nucleic Acid Sequences Referred to Herein

| | SEQ | | | | | |
|---|---|---|---|---|---|---|
| | ID | | | | Other | Sequence |
| Category | NO: | Description | Type | Organism | Information | |
| Cytosine | 594 | CMP/dCMP- | protein | Cebus | unknown | MEASPASRPRPLMGPR |
| Deaminase | | type | | imitator | | TFTENFTNNPEVFGRH |
| | | deaminase | | | | QTYLCYEVKCQGPDG |
| | | domain- | | | | TRDLMTEQRDFLCNQ |
| | | containing | | | | ARNLLSGFDGRHAER |
| | | protein | | | | CFLDRVPSWRLDPAQ |
| | | (uniprot | | | | TYRVTCFISWSPCFSC |
| | | accession | | | | AREVAEFLQENPHVN |
| | | A0A2K5RDN7) | | | | LRIFAARIYDCRPRYEE |
| | | | | | | GLQMLQNAGAQVSIM |
| | | | | | | TSEEFRHCWDTFVDH |
| | | | | | | QGHPFQPWEGLDEHS |
| | | | | | | QALSRRLQAILQGNR |
| | | | | | | WMILSL |
| Adenosine | 595 | TadA* | protein | unknown | unknown | MSEVEFSHEYWMRHA |
| Deaminase | | (ABE8.17m) | | | | LTLAKRARDEREVPV |
| | | | | | | GAVLVLNNRVIGEGW |
| | | | | | | NRAIGLHDPTAHAEIM |
| | | | | | | ALRQGGLVMQNYRLI |
| | | | | | | DATLYSTFEPCVMCA |
| | | | | | | GAMIHSRIGRVVFGVR |
| | | | | | | NAKTGAAGSLMDVLH |
| | | | | | | YPGMNHRVEITEGILA |
| | | | | | | DECAALLCYFFRMPR |
| | | | | | | RVFNAQKKAQSSTD |
| MG34 | 596 | MG34-1 | protein | unknown | uncultivated | MERELVLGIDYGGKY |
| active | | effector | | | organism | TGLAVVDRRHNQVLY |
| effectors | | | | | | ANRLKMRDDVAGILK |
| | | | | | | DRRKQRGIRRTAQTK |
| | | | | | | KKRLRELKNYLKSIGY |
| | | | | | | NESTATFETVYSLAHK |
| | | | | | | RGYDYADMPEEKTSE |
| | | | | | | EIEAMDVEERKQWEK |
| | | | | | | EKQEWEETKRNSRHR |
| | | | | | | KEVVKDVHKAMIEGR |
| | | | | | | ATEEQIKRVERIFNKQ |
| | | | | | | YRPKRFNNRILTKCKV |
| | | | | | | EDCGVNTPLRKNVRD |
| | | | | | | LLIENIVRFFPIEQSEKD |
| | | | | | | NLKDAVLDKNRREEV |
| | | | | | | KSFFRKHKTDEHIRKQ |
| | | | | | | VYDIADNKLSGRTVFC |
| | | | | | | KEHILEHTEHSKEERK |
| | | | | | | VFRLAPSLKTKIENVL |
| | | | | | | AVIKDEILPKFTVNKV |
| | | | | | | VMESNNFDIAAKTQG |
| | | | | | | KKRLAKEEYGKGPRE |
| | | | | | | GKETRKEALLRETDG |
| | | | | | | RCIYCGKSIDISNAHD |
| | | | | | | DHIFPRKAGGLNIFAN |
| | | | | | | LVACCAVCNENKKGR |
| | | | | | | TPLESGISPKPEIIAFMK |
| | | | | | | NDLKKKILEDARNINT |
| | | | | | | VDFNKYMSHASIGWR |
| | | | | | | YMRDRLRESAGNKKL |
| | | | | | | PIERQSGIYTAYFRRW |
| | | | | | | WGFKKERGNTLHHAL |
| | | | | | | DAVILASRKGYSDDGL |
| | | | | | | VDMTLKPKYNKGGEF |
| | | | | | | DPEKHLPEPIEFKMDK |
| | | | | | | GSRGSALHDRNPLSYK |
| | | | | | | KGIITRRFMVTEIECGK |
| | | | | | | EDDVISETYREKLKEA |
| | | | | | | FKRFDTKKGKCLTDK |
| | | | | | | EAKEAGFCIKKNELV |
| | | | | | | MSLKCSIKGTGPGQMI |
| | | | | | | RINNNVFKTNVHNVG |
| | | | | | | VDVYLDEKGKKKAYE |
| | | | | | | RKNPRLSKHFIEPPPQP |
| | | | | | | NGRVSFTLKRRDMVT |
| | | | | | | VEGEDAIYRIKKLGTS |
| | | | | | | PTIEAVVGSDGKTRTV |
| | | | | | | SATKLTKANSAE |
| nickase | 597 | MG34-1 | protein | unknown | uncultivated | MERELVLGIAYGGKY |
| | | (D10A) | | | organism | TGLAVVDRRHNQVLY |
| | | | | | | ANRLKMRDDVAGILK |
| | | | | | | DRRKQRGIRRTAQTK |
| | | | | | | KKRLRELKNYLKSIGY |
| | | | | | | NESTATFETVYSLAHK |
| | | | | | | RGYDYADMPEEKTSE |
| | | | | | | EIEAMDVEERKQWEK |
| | | | | | | EKQEWEETKRNSRHR |
| | | | | | | KEVVKDVHKAMIEGR |
| | | | | | | ATEEQIKRVERIFNKQ |
| | | | | | | YRPKRFNNRILTKCKV |
| | | | | | | EDCGVNTPLRKNVRD |
| | | | | | | LLIENIVRFFPIEQSEKD |
| | | | | | | NLKDAVLDKNRREEV |
| | | | | | | KSFFRKHKTDEHIRKQ |
| | | | | | | VYDIADNKLSGRTVFC |
| | | | | | | KEHILEHTEHSKEERK |
| | | | | | | VFRLAPSLKTKIENVL |
| | | | | | | AVIKDEILPKFTVNKV |
| | | | | | | VMESNNFDIAAKTQG |
| | | | | | | KKRLAKEEYGKGPRE |
| | | | | | | GKETRKEALLRETDG |
| | | | | | | RCIYCGKSIDISNAHD |
| | | | | | | DHIFPRKAGGLNIFAN |
| | | | | | | LVACCAVCNENKKGR |
| | | | | | | TPLESGISPKPEIIAFMK |
| | | | | | | NDLKKKILEDARNINT |
| | | | | | | VDFNKYMSHASIGWR |
| | | | | | | YMRDRLRESAGNKKL |
| | | | | | | PIERQSGIYTAYFRRW |
| | | | | | | WGFKKERGNTLHHAL |
| | | | | | | DAVILASRKGYSDDGL |
| | | | | | | VDMTLKPKYNKGGEF |
| | | | | | | DPEKHLPEPIEFKMDK |
| | | | | | | GSRGSALHDRNPLSYK |
| | | | | | | KGIITRRFMVTEIECGK |
| | | | | | | EDDVISETYREKLKEA |
| | | | | | | FKRFDTKKGKCLTDK |
| | | | | | | EAKEAGFCIKKNELV |
| | | | | | | MSLKCSIKGTGPGQMI |
| | | | | | | RINNNVFKTNVHNVG |
| | | | | | | VDVYLDEKGKKKAYE |
| | | | | | | RKNPRLSKHFIEPPPQP |
| | | | | | | NGRVSFTLKRRDMVT |
| | | | | | | VEGEDAIYRIKKLGTS |
| | | | | | | PTIEAVVGSDGKTRTV |
| | | | | | | SATKLTKANSAE |
| PAM | 598 | MG34-1 | nucleo- | unknown | unknown | NGG |
| | | PAM | tide | | | |

### EXAMPLES

### Example 1.—Plasmid Construction for Base Editors

[0204] To create base editing enzymes that utilize CRISPR functionality to target their base editing, Cas effector enzymes were fused in various configurations to the exemplary deaminases described herein. This process involved a first stage of constructing vectors suitable for generating the fusion enzymes. Two entry plasmid vectors, MGA, and MGC, were first constructed.

[0205] To construct the MGA (Metagenomi adenine base editor) entry plasmid containing T7 promoter-His tag-TadA*(ABE8.17m)-SV40 NLS, three DNA fragments were amplified from pAL6. To construct the MGC (Metagenomi cytosine base editor) entry plasmid containing T7 promoter-His tag-APOBEC1 (BE3)-UGI-SV40 NLS, APOBEC1 and UGI-SV40 NLS were amplified from pAL9 and two pieces of vector backbones were amplified from pAL6 (see FIG. 3).

[0206] To introduce mutations into the effectors, source plasmids containing MG1-4, MG1-6, MG3-6, MG3-7, MG3-8, MG4-5, MG14-1, MG15-1, or MG18-1 effector gene sequences were amplified by Q5 DNA polymerase with forward primers incorporating appropriate mutations and reverse primers. The linear DNA fragments were then phosphorylated and ligated. The DNA templates were digested with DpnI using KLD Enzyme Mix (New England Biolabs) per the manufacturer's instructions.

[0207] To generate the pMGA and pMGC expression plasmids, genes were amplified from plasmids carrying mutated effectors and cloned into MGA and MGC entry plasmids via XhoI and SacII sites, respectively. To clone sgRNA expression cassettes comprising T7 promoter-sgRNA-bidirectional terminator into BE expression plasmids, one set of primers (P366 as the forward primer) was used to amplify a T7 promoter-spacer sequence while another set of primers (P367 as the reverse primer) was used to amplify spacer sequence-sgRNA scaffold-bidirectional terminator, in which pTCM plasmids were used as templates (see FIG. 2). The two fragments were assembled into pMGA and pMGC via XbaI sites, resulting pMGA-sgRNA and pMGC-sgRNA, respectively.

TABLE 3
Summary of constructs made for
ABE screening systems
described herein

| # | Application | Candidate |
|---|---|---|
| 1 | ABE | MGA1-4-sgRNA1 |
| 2 | | MGA1-4-sgRNA2 |
| 3 | | MGA1-4-sgRNA3 |
| 4 | | MGA1-6-sgRNA1 |
| 5 | | MGA1-6-sgRNA2 |
| 6 | | MGA1-6-sgRNA3 |
| 7 | | MGA3-6-sgRNA1 |
| 8 | | MGA3-6-sgRNA2 |
| 9 | | MGA3-6-sgRNA3 |
| 10 | | MGA3-7-sgRNA1 |
| 11 | | MGA3-7-sgRNA2 |
| 12 | | MGA3-7-sgRNA3 |
| 13 | | MGA3-8-sgRNA1 |
| 14 | | MGA3-8-sgRNA2 |
| 15 | | MGA3-8-sgRNA3 |
| 16 | | MGA14-1-sgRNA1 |
| 17 | | MGA14-1-sgRNA2 |
| 18 | | MGA14-1-sgRNA3 |
| 19 | | MGA15-1-sgRNA1 |
| 20 | | MGA15-1-sgRNA2 |
| 21 | | MGA15-1-sgRNA3 |
| 22 | | MGA18-1-sgRNA1 |
| 23 | | MGA18-1-sgRNA2 |
| 24 | | MGA18-1-sgRNA3 |
| 25 | | ABE8.17m-sgRNA1 |
| 26 | | ABE8.17m-sgRNA2 |
| 27 | | ABE8.17m-sgRNA3 |
| 28 | CBE | MGC1-4-sgRNA1 |
| 29 | | MGC1-4-sgRNA2 |
| 30 | | MGC1-4-sgRNA3 |
| 31 | | MGC1-6-sgRNA1 |
| 32 | | MGC1-6-sgRNA2 |
| 33 | | MGC1-6-sgRNA3 |
| 34 | | MGC3-6-sgRNA1 |
| 35 | | MGC3-6-sgRNA2 |
| 36 | | MGC3-6-sgRNA3 |
| 37 | | MGC3-7-sgRNA1 |
| 38 | | MGC3-7-sgRNA2 |
| 39 | | MGC3-7-sgRNA3 |
| 40 | | MGC3-8-sgRNA1 |
| 41 | | MGC3-8-sgRNA2 |
| 42 | | MGC3-8-sgRNA3 |
| 43 | | MGC4-5-sgRNA1 |
| 44 | | MGC4-5-sgRNA2 |
| 45 | | MGC4-5-sgRNA3 |
| 46 | | MGC14-1-sgRNA1 |
| 47 | | MGC14-1-sgRNA2 |
| 48 | | MGC14-1-sgRNA3 |
| 49 | | MGC15-1-sgRNA1 |
| 50 | | MGC15-1-sgRNA2 |
| 51 | | MGC15-1-sgRNA3 |
| 52 | | MGC18-1-sgRNA1 |
| 53 | | MGC18-1-sgRNA2 |
| 54 | | MGC18-1-sgRNA3 |
| 55 | | BE3-sgRNA1 |
| 56 | | BE3-sgRNA2 |
| 57 | | BE3-sgRNA3 |

[0208] All amplified DNA fragments were purified by QIAquick Gel Extraction Kit (Qiagen), assembled via NEBuilder HiFi DNA Assembly (New England Biolabs), and the resulting assemblies were propagated via Endura Electrocompetent cells (Lucergen) per the manufacturer's instructions (see FIGS. 4 & 5). The DNA sequences of all cloned genes were confirmed at ELIM BIOPHARM.

TABLE 4
Conserved catalytic residues parsed out
for selected systems described herein

| Nickase | | Associated Full-length |
|---|---|---|
| Candidate | Length | Protein Sequence |
| nMG1-4 (D9A) | 1025 | SEQ ID NO: 70 |
| nMG1-6 (D13A) | 1059 | SEQ ID NO: 71 |
| nMG3-6 (D13A) | 1134 | SEQ ID NO: 72 |
| nMG3-7 (D12A) | 1131 | SEQ ID NO: 73 |
| nMG3-8 (D13A) | 1132 | SEQ ID NO: 74 |
| nMG4-5 (D17A) | 1055 | SEQ ID NO: 75 |
| nMG14-1 (D23A) | 1003 | SEQ ID NO: 76 |
| nMG15-1 (D8A) | 1082 | SEQ ID NO: 77 |
| nMG18-1 (D12A) | 1348 | SEQ ID NO: 78 |

### Example 2.—Protein Expression and Purification

[0209] The T7 promoter driven mutated effector genes in the pMGA and pMGC plasmids were expressed in E. coli BL21 (DE3) cells in Magic Media per manufacturer's instructions (Thermo) by transformation with each of the respective plasmids described in Example 1 above. After a 40 hour incubation at 16° C. the transformed cells were harvested, suspended in lysis buffer (HisTrap equilibration buffer: 20 mM Tris (Sigma T2319-100 ML), 300 mM sodium chloride (VWR VWRVE529-500 ML), 5% glycerol, 10 mM MgCl₂, with 10 mM imidazole (Sigma 68268-100 ML-F); pH 7.5) and EDTA-free protease inhibitor (Pierce), and frozen in the −80° C. freezer. The cells were then thawed on ice, sonicated, clarified, and filtered before affinity purification. The protein was applied to Cytiva 5 ml HisTrap FF column on the Akta Avant FPLC per the manufacturer's specifications and the protein was eluted in an isocratic elution of 20 mM Tris (Sigma T2319-100 ML), 300 mM sodium chloride (VWR VWRVE529-500 ML), 5% glycerol, 10 mM MgCl₂, with 250 mM imidazole (Sigma 68268-100 ML-F); pH 7.5. Eluted fractions containing the His-tagged effector proteins were concentrated and buffer exchanged into 50 mM Tris-HCl, 300 mM NaCl, 1 mM TCEP, 5% glycerol; pH 7.5. The protein concentration was determined by bicinchoninic acid assay (Thermo) and adjusted after determining the relative purity by SDS PAGE densitometry in Image Lab (Bio-Rad) (see FIG. 7).

### Example 3.—In Vitro Nickase Assay

[0210] 6-carboxyfluorescein (6-FAM) labeled primers P141 and P146 (SEQ ID NOs: 179 and 180) synthesized by IDT were used to amplify linear fragments of LacZ containing targeting sequences of effectors using Q5 DNA polymerase. DNA fragments containing the T7 promoter followed by sgRNAs containing 20-bp or 22-bp spacer sequences were transcribed in vitro using HiScribe T7 High Yield RNA Synthesis Kit (New England Biolabs) per manufacturer's instructions. Synthetic sgRNAs with the sequences corresponding to the named sgRNAs in the sequence listing were purified by Monarch RNA Cleanup Kit (New England Biolabs) according to the users manual and concentrations were measured by Nanodrop.

[0211] To determine DNA nickase activity, each of the purified mutated effectors was first supplemented with its cognate sgRNA. Reactions were initiated by adding the linear DNA substrate in a 15 μL reaction mixture containing 10 mM Tris pH 7.5, 10 mM MgCl₂, and 100 mM NaCl, 150 nM enzyme, 150 nM RNA, and 15 nM DNA. The reaction was incubated at 37° C. for 2 h. Digested DNA was purified using AMPure XP SPRI paramagnetic beads (Beckman Coulter) and eluted with 6 μL TE buffer (10 mM Tris, 1 mM EDTA; pH 8.0). The nicked DNA was resolved on a 10% TBE-Urea denaturing gel (Biorad) and imaged by ChemiDoc (Bio-Rad) (see FIG. 7, which shows that the depicted enzymes display nickase activity by production of bands 600 and 200 bases versus 400 and 200 bases in the case of the wild-type enzyme). The results indicated that all the tested nickase mutants in FIG. 7 displayed their expected nickase activity instead of wild type cleavage activity with the exception of MG4-5 (D17A), which was inconclusive.

### Example 4.—Base Editor Introduction into E. coli

[0212] Plasmids were transformed into Lucergen's electrocompetent BL21(DE3) cells according to the manufacturer's instructions. After electroporation, cells were recovered with expression recovery media at 37° C. for 1 h and spread on LB plates containing 100 L/mg ampicillin and 0.1 mM IPTG. After overnight growth at 37° C., colonies were picked and lacZ gene was amplified by Q5 DNA polymerase (New England Biolabs) with primers P137 and P360. The resulting PCR products were purified and sequenced by Sanger sequencing at ELIM BIOPHARM. Base edits were determined by examining whether there exists C to T conversion or A to G conversion in the targeted protospacer regions for cytosine base editors or adenine base editors, respectively.

[0213] To evaluate editing efficiency in E. coli, plasmids were transformed into electrocompetent BL21(DE3) (Lucergen) and the electroporated cells were recovered with expression recovery media at 37° C. for 1 h. 10 μL of recovered cells were then inoculated into 990 μL SOB containing 100 ampicillin and 0.1 mM IPTG in a 96-well deep well plate, and grown at 37° C. for 20 h. 1 cells induced for base editor expression were used for amplification of the lacZ gene in a 20 PCR reaction (Q5 DNA polymerase) with primers P137 and P360. The resulting PCR products were purified and sequenced by Sanger sequencing at ELIM BIOPHARM. Quantification of editing efficiency was processed by Edit R as described in Example 12.

TABLE 5
The MG base editors described herein with associated PAM and deaminases

| | | | | Linker | | | Linker |
|---|---|---|---|---|---|---|---|
| Can- | | | | (Deaminase- | | | (Nickase- |
| didate | Type | PAM | Deaminase | Nickase) | Nickase | UGI | UGI) |
| MGA1-4 | II | nRRR | TadA* | SGGSSGGSSGSE | nMG1-4(D9A) | — | |
| | | SEQ ID | (ABE8.17m) | TPGTSESATPESS | SEQ ID NO: 70 | | |
| | | NO: 360 | SEQ ID NO: 595 | GGSSGGS | | | |
| MGA3-7 | II | nnRnYAY | TadA* | SGGSSGGSSGSE | nMG3-7(D12A) | — | |
| | | SEQ ID | (ABE8.17m) | TPGTSESATPESS | SEQ ID NO: 73 | | |
| | | NO: 363 | SEQ ID NO: 595 | GGSSGGS | | | |
| MGA18-1 | II | nRWART | TadA* | SGGSSGGSSGSE | nMG18-1 | — | |
| | | SEQ ID | (ABE8.17m) | TPGTSESATPESS | (D12A) | | |
| | | NO: 368 | SEQ ID NO: 595 | GGSSGGS | SEQ ID NO: 78 | | |
| MGC1-6 | II | nnRRAY | APOBEC1 (BE3) | SGSETPGTSESAT | nMG1-6(D13A) | UGI(BE3) | GSGGS |
| | | SEQ ID | SEQ ID NO: 58 | PESA | SEQ ID NO: 71 | SEQ ID | |
| | | NO: 361 | | | | NO: 67 | |
| MGC3-7 | II | nnRnYAY | APOBEC1(BE3) | SGSETPGTSESAT | nMG3-7(D12A) | UGI(BE3) | GSGGS |
| | | SEQ ID | SEQ ID NO: 58 | PESA | SEQ ID NO: 73 | SEQ ID | |
| | | NO: 363 | | | | NO: 67 | |
| MGC4-5 | II | nRCCV | APOBEC1(BE3) | SGSETPGTSESAT | nMG4-5(D17A) | UGI(BE3) | GSGGS |
| | | SEQ ID | SEQ ID NO: 58 | PESA | SEQ ID NO: 74 | SEQ ID | |
| | | NO: 365 | | | | NO: 67 | |
| MGC14-1 | II | nRnnGRKA | APOBEC1(BE3) | SGSETPGTSESAT | nMG14-1 | UGI(BE3) | GSGGS |
| | | SEQ ID | SEQ ID NO: 58 | PESA | (D23A) | SEQ ID | |
| | | NO: 366 | | | SEQ ID NO: 76 | NO: 67 | |
| MGC15-1 | II | nnnnC | APOBEC1(BE3) | SGSETPGTSESAT | nMG15-1(D8A) | UGI(BE3) | GSGGS |
| | | SEQ ID | SEQ ID NO: 58 | PESA | SEQ ID NO: 77 | SEQ ID | |
| | | NO: 367 | | | | NO: 67 | |
| MGC18-1 | II | nRWART | APOBEC1(BE3) | SGSETPGTSESAT | nMG18-1 | UGI(BE3) | GSGGS |
| | | SEQ ID | SEQ ID NO: 58 | PESA | (D12A) | | |
| | | NO 368 | | | SEQ ID NO: 78 | | |

### Example 5.—Protein Nucleofection and Amplicon Seq in Mammalian Cells (Prophetic)

[0214] Nucleofection is conducted in mammalian cells (e.g. K-562, Neuro-2A or RAW264.7) according to the manufacturer's recommendations using a Lonza 4D nucleofector and the Lonza SF Cell Line 4D-Nucleofector X Kit S (cat. no. V4XC-2032). After formulating the SF nucleofection buffer, 200,000 cells are resuspended in 5 μl of buffer per nucleofection. In the remaining 15 μl of buffer per nucleofection, 20 pmol of chemically modified sgRNA from Synthego is combined with 18 pmol of base editor enzymes (e.g. ABE8e) and incubated for 5 min at room temperature to complex. Cells are added to the 20 μl nucleofection cuvettes, followed by protein solution, and the mixture is triturated to mix. Cells are nucleofected with program CM-130, immediately after which 80 μl of warmed media is added to each well for recovery. After 5 min, 25 μl from each sample is added to 250 μl of fresh media in a 48-well poly-d-lysine plate (Corning). Cells are then treated in the same way as lipofected cells above for genomic DNA extraction after three more days of culture.

[0215] Following Illumina barcoding, PCR products are pooled and purified by electrophoresis with a 2% agarose gel using a Monarch DNA Gel Extraction Kit (New England Biolabs), eluting with 30 μl H2O. DNA concentration is quantified with a Qubit dsDNA High Sensitivity Assay Kit (Thermo Fisher Scientific) and sequenced on an Illumina MiSeq instrument (paired-end read, R1: 250-280 cycles, R2: 0 cycles) according to the manufacturer's protocols.

[0216] Sequencing reads are demultiplexed using the MiSeq Reporter (Illumina) and FASTQ files are analyzed using CRISPResso2. Dual editing in individual alleles is analyzed by a Python script. Base editing values are representative of n=3 independent biological replicates collected by different researchers, with the mean±s.d. shown. Base editing values are reported as a percentage of the number of reads with adenine mutagenesis over the total aligned reads.

### Example 6.—Plasmid Nucleofection and Whole Genome Seq in Mammalian Cells (Prophetic)

[0217] All plasmids are assembled by the uracil-specific excision reagent (USER) cloning method. Guide RNA plasmids for SpCas9, SaCas9 and all engineered variants are assembled. Plasmids for mammalian cell transfections are prepared using the ZymoPURE Plasmid Midiprep kit (Zymo Research Corporation). HEK293T cells (ATCC CRL-3216) are cultured in Dulbecco's modified Eagle's medium (Corning) supplemented with 10% fetal bovine serum (ThermoFisher Scientific) and maintained at 37° C. with 5% CO2.

[0218] HEK293T cells are seeded on 48-well poly-d-lysine plates (Corning) in the same culture medium. Cells are transfected 12-16 h after plating with 1.5 μl Lipofectamine 2000 (ThermoFisher Scientific) using 750 ng base editor plasmid, 250 ng guide RNA plasmid and 10 ng green fluorescent protein as a transfection control. Cells are cultured for 3 d with media exchanged following the first day, then washed with Å˜1 PBS (ThermoFisher Scientific), followed by genomic DNA extraction by addition of 100 μl freshly prepared lysis buffer (10 mM Tris-HCl, pH 7.5, 0.05% SDS, 25 μg ml-1 proteinase K (ThermoFisher Scientific)) directly into each transfected well. The mixture is incubated at 37° C. for 1 h then heat inactivated at 80° C. for 30 min. Genomic DNA lysate is subsequently used immediately for high-throughput sequencing (HTS).

[0219] HTS of genomic DNA from HEK293T cells is performed. Following Illumina barcoding, PCR products are pooled and purified by electrophoresis with a 2% agarose gel using a Monarch DNA Gel Extraction Kit (NEB), eluting with 30 μl H2O. DNA concentration is quantified with Qubit dsDNA High Sensitivity Assay Kit (ThermoFisher Scientific) and sequenced on an Illumina MiSeq instrument (paired end read, R1: 250-280 cycles, R2: 0 cycles) according to the manufacturer's protocols.

### Example 7.—Determining Editing Window (Prophetic)

[0220] To examine the editing window regions, the cytosine showing the highest C-T conversion frequency in a specified sgRNA is normalized to 1, and other cytosines at positions spanning from 30 nt upstream to 10 nt downstream of the PAM sequence (total 43 bp) of the same sgRNA are normalized subsequently. Then normalized C-T conversion frequencies are classified and compared according to their positions for all tested sgRNAs of a specified base editor. A comprehensive editing window (CEW) is defined to span positions with an average C-T conversion efficiency exceeding 0.6 after normalization.

[0221] To examine the substrate preference for each cytidine deaminase, C sites are initially classified according to their positions in sgRNA targeting regions and those positions containing at least one C site with >0.8 normalized C-T conversion frequency are included in subsequent analysis. Selected C sites are then compared depending on base types upstream or downstream of the edited cytosine (NC or CN). For cytidine deaminases showing efficient C-T conversion at both N-terminus and C-terminus of the endonuclease, the substrate preference is evaluated by integrating respective NT- and CT-CBEs together. For statistical analysis, one-way ANOVA is used and p<0.05 is considered as significant

### Example 8a.—Testing Off-Target Analysis with Whole Genome Sequencing and Transcriptomics in Mammalian Cells (Prophetic)

[0222] HEK293T cells are plated on 48-well poly-d-lysine-coated plates 16 to 20 h before lipofection at a density of 3.104 cells per well in DMEM+GlutaMAX medium (Thermo Fisher Scientific) without antibiotics. 750 ng nickase or base editor expression plasmid DNA is combined with 250 ng of sgRNA expression plasmid DNA in 15 μl Opti-MEM+GlutaMAX. This is combined with 10 μl of lipid mixture, comprising 1.5 μl Lipofectamine 2000 and 8.5 μl Opti-MEM+GlutaMAX per well. Cells are harvested 3 d after transfection and either DNA or RNA was harvested. For DNA analysis, cells are washed once in PBS, and then lysed in 100 μl QuickExtract Buffer (Lucigen) according to the manufacturer's instructions. For RNA harvest, the MagMAX mirVana Total RNA Isolation Kit (Thermo Fisher Scientific) is used with the KingFisher Flex.

[0223] Genomic DNA from mammalian cells is fragmented and adapter-ligated using the Nextera DNA Flex Library Prep Kit (Illumina) using 96-well plate Nextera indexing primers (Illumina), according to the manufacturer's instructions. Library size and concentration is confirmed by Fragment Analyzer (Agilent) and DNA is sent to Novogene for WGS using an Illumina HiSeq system.

[0224] All targeted NGS data is analyzed by performing four general steps: (1) alignment; (2) duplicate marking; (3) variant calling; and (4) background filtration of variants to remove artifacts and germline mutations. The mutation reference and alternate alleles are reported relative to the plus strand of the reference genome.

[0225] For whole Transcriptome sequencing, mRNA selection is performed using the NEBNext Poly(A) mRNA Magnetic Isolation Module (New England BioLabs). RNA library preparation is performed using NEBNext Ultra II RNA Library Prep Kit for Illumina (New England BioLabs). Based on the RNA input amount, a cycle number of 12 is used for the PCR enrichment of adapter-ligated DNA. NEBNext Sample Purification Beads (New England BioLabs) is used throughout for all of the size selection performed by this method. NEBNext Multiplex Oligos for Illumina (New England BioLabs) is used for the multiplex indexes in accordance with the PCR recipe outlined in the protocol. Prior to sequencing, samples are quality checked using the High Sensitivity D1000 ScreenTape on the 4200 TapeStation System (Agilent). The libraries are pooled and sequenced using a NovaSeq (Novogene). Targeted RNA sequencing is then performed. Complementary DNA is generated by PCR with reverse transcription (RT-PCR) from the isolated RNA using the SuperScript IV One-Step RT-PCR System with EZDnase (Thermo Fisher Scientific) according to the manufacturer's instructions.

[0226] The following program is used: 58° C. for 12 min; 98° C. for 2 min; followed by PCR cycles that varied by amplicon: for CTNNB1 and IP90; 32 cycles of (98° C. for 10 s; 60° C. for 10 sec; 72° C. for 30 sec). Following the combined RT-PCR, amplicons are barcoded and sequenced using an Illumina MiSeq sequencer as described above. The first 125 nucleotides in each amplicon, beginning at the first base after the end of the forward primer in each amplicon, are aligned to a reference sequence and used for analysis of maximum A-to-I frequencies in each amplicon. Off-target DNA sequencing is performed using primers, using a two-step PCR and barcoding method to prepare samples for sequencing using Illumina MiSeq sequencers as above.

### Example 8b.—Analysis of Off-Target Edits by Whole Genome Sequencing and Transcriptomics (Prophetic)

[0227] Transfected cells prepared as in Example 8a are harvested after 3 days and the genomic DNA isolated using the Agencourt DNAdvance Genomic DNA Isolation Kit (Beckman Coulter) according to the manufacturer's instructions. On-target and off-target genomic regions of interest are amplified by PCR with flanking HTS primer pairs. PCR amplification is carried out with Phusion high-fidelity DNA polymerase (ThermoFisher) according to the manufacturer's instructions using 5 ng of genomic DNA as a template. Cycle numbers are determined separately for each primer pair as to ensure the reaction was stopped in the linear range of amplification (30, 28, 28, 28, 32, and 32 cycles for EMX1, FANCF, HEK293 site 2, HEK293 site 3, HEK293 site 4, and RNF2 primers, respectively). PCR products are purified using RapidTips (Diffinity Genomics). Purified DNA is amplified by PCR with primers containing sequencing adaptors. The products are gel-purified and quantified using the Quant-iT™ PicoGreen dsDNA Assay Kit (ThermoFisher) and KAPA Library Quantification Kit-Illumina (KAPA Biosystems). Samples are sequenced on an Illumina MiSeq as previously described.

[0228] Sequencing reads are automatically demultiplexed using MiSeq Reporter (Illumina), and individual FASTQ files are analyzed with a custom Matlab script. Each read is pairwise aligned to the appropriate reference sequence using the Smith-Waterman algorithm. Base calls with a Q-score below 31 are replaced with N's and are thus excluded in calculating nucleotide frequencies. This treatment yields an expected MiSeq base-calling error rate of approximately 1 in 1,000. Aligned sequences in which the read and reference sequence contained no gaps are stored in an alignment table from which base frequencies were tabulated for each locus. Indel frequencies were quantified with a custom Matlab script.

[0229] Sequencing reads are scanned for exact matches to two 10-bp sequences that flank both sides of a window in which indels might occur. If no exact matches were located, the read is excluded from analysis. If the length of this indel window exactly matched the reference sequence the read is classified as not containing an indel. If the indel window is two or more bases longer or shorter than the reference sequence, then the sequencing read is classified as an insertion or deletion, respectively.

### Example 9.—Mouse Editing Experiments (Prophetic)

[0230] It is envisaged that a base editor consisting of a novel DNA targeting nuclease domain fused to a novel deaminase domain can be validated as a therapeutic candidate by testing in appropriate mouse models of disease.

[0231] One example of an appropriate model comprises mice that have been engineered to express the human PCSK9 protein, for example, as described by Herbert et al (10.1161/ATVBAHA.110.204040). The PCSK9 protein regulates LDL receptor (LDLR) levels and influences serum cholesterol levels. Mice expressing the human PCSK9 protein exhibit elevated levels of cholesterol and more rapid development of atherosclerosis. PCSK9 is a validated drug target for the reduction of lipid levels in people at increased risk of cardiovascular disease due abnormally high plasma lipid levels (https://doi.org/10.1038/s41569-018-0107-8). Reducing the levels of PCSK9 via genome editing is expected to permanently lower lipid levels for the life-time of the individual thus providing a life-long reduction in cardiovascular disease risk. One genome editing approach can involve targeting the coding sequence of the PCSK9 gene with the goal of editing a sequence to create a premature stop codon and thus prevent the translation of the PCSK9 mRNA into a functional protein. Targeting a region close to the 5′ end of the coding sequence is useful in order to block translation of the majority of the protein. To create a stop codon (TGA, TAA, TAG) with high efficiency and specificity will require targeting a region of the PCSK9 coding sequence wherein the editing window will be placed over an appropriate sequence such that the highest frequency editing event results in a stop codon. Therefore, the availability of multiple base editing systems with a wide range of PAMs or a base editing system with a degenerate PAM is useful to access a larger number of potential target sites in the PCSK9 gene. In addition, additional editing systems wherein the frequency of off-target editing is low (e.g. in the range of 1% or less of the on-target editing events) are also useful to perform gene editing in this context.

[0232] The efficiency of base editing required for a therapeutic effect is in the range of 50% or higher in order to achieve a significant reduction in plasma lipid levels. An example of the use of a base editor to create a stop codon in the PCSK9 gene is that of Carreras et al (https://doi.org/10.1186/s12915-018-0624-2) in which between 10% and 34% of the PCSK9 alleles were edited to create a stop codon. While this level of editing was sufficient to result in a measurable reduction in plasma lipid levels in the mice, a higher editing efficiency will be required for therapeutic use in humans.

[0233] To identify a base-editing (BE) system and a guide that are optimal for introducing the stop codons in the PCSK9 gene, a screen may be performed in a mouse liver cell line such as Hepa1-6 cells. In silico screening may first be used to identify guides that target the PCSK9 gene with the various BE systems available. To select among the large number of possible guides an in-silico analysis may be performed to determine which guides have an editing window that encompasses a sequence that when edited may create a stop codon. Preference may then be given to those guides that are closer to the 5′ end of the coding sequence. The resulting set of guides and BE proteins may be combined to form a ribonucleoprotein complex (RNP) and may be nucleofected into Hepa1-6 cells. After 72 h the efficiency of editing at the target site may be determined by NGS analysis. Based on these in vitro results the one or more BE/guide combinations that resulted in the highest frequency of stop codon formation may be selected for in vivo testing.

[0234] For application in a human therapeutic setting a safe and effective method of delivering the base editing components comprising the base editor and the guide RNA is required. In vivo delivery methods can be divided in to viral or non-viral methods. Among viral vectors the Adeno Associated Virus (AAV) is the virus of choice for clinical use due to its safety record, efficient delivery to multiple tissues and cell types and established manufacturing processes. The large size of base editors (BE) exceeds the packaging capacity of AAV which interferes with packaging in a single Adeno Associated Virus. While approaches that package BE into two AAV using split intein technology have been demonstrated to be successful in mice (https://doi.org/10.1038/s41551-019-0501-5), the need for 2 viruses complicates development and manufacture. An additional disadvantage of AAV is that while the virus does not have a mechanism for promoting integration into the genome of host cells, and most of the AAV genomes remain episomal, a fraction of the AAV genomes do become integrated at random double strand breaks that occur naturally in cells (Curr Opin Mol Ther. 2009 August; 11(4): 442-447). This may lead to the persistence of gene sequences expressing the BE for the life-time of the organism. Moreover, AAV genomes persist as episomes inside the nucleus of transduced cells and can be maintained for years which may result in the long-term expression of BE in these cells and thus an increased risk of off-target effects because the risk of an off-target event occurring is a function of the time over which the editing enzyme is active. Adenovirus (Ad) such as Ad5 can efficiently deliver DNA payloads to the liver of mammals and can package up to 45 kb of DNA. However, adenoviruses are known to induce a strong immune response in mammals (http://dx.doi.org/10.1136/gut.48.5.733), including in patients which can result in serious adverse events including death (https://doi.org/10.1016/j.ymthe.2020.02.010).

[0235] Non-viral delivery vectors (reviewed in doi:10.1038/mt.2012.79) which include lipid nanoparticles and polymeric nanoparticles have several advantages compared to viral delivery vectors including lower immunogenicity and transient expression of the nucleic acid cargo. The transient expression elicited by non-viral delivery vectors is particularly suited to genome editing applications because it is expected to minimize off target events. In addition, non-viral delivery unlike viral vectors has the potential for repeat administration to achieve the therapeutic effect. There is also no theoretical limit to the size of the nucleic acid molecules that can be packaged in non-viral vectors, although in practice the packaging becomes less efficient as the size of the nucleic acid increases and the particles size may increase.

[0236] A BE may be delivered in vivo using a non-viral vector such as a lipid nanoparticle (LNP) by encapsulating a synthetic mRNA encoding the BE together with the guide RNA into the LNP. This can be performed using methodologies well known in the art, for example as described by Finn et al (DOI: 10.1016/j.celrep.2018.02.014) or Yin et al (doi:10.1038/nbt.3471). Typically, LNP deliver their cargo primarily to the hepatocytes of the liver, which is also a target organ/cell type when attempting to interfere with the expression of the PCSK9 gene. In order to demonstrate proof of concept for this approach we envisage that a BE comprised of a novel genome editing protein fused to a deaminase domain may be encoded in a synthetic mRNA and packaged in a LNP together with an appropriate guide RNA that targets the selected site in the PCSK9 gene of the mouse. In the case of mice that were engineered to express the human PCSK9 gene the guide may be designed to target only the human PCSK9 gene or both the human and mouse PCSK9 genes. Following injection of these LNP the editing efficiency at the on-target site in the genome of the liver cells may be analyzed by amplicon sequencing or other methods such as tracking of indels by decomposition (doi: 10.1093/nar/gku936). The physiologic impact may be determined by measuring lipid levels in the blood of the mice, including total cholesterol and triglyceride levels using standard methods.

[0237] Another example of a disease that may be modeled in mice to evaluate a novel BE is Primary Hyperoxaluria type I. Primary Hyperoxaluria type I (PH1) is a rare autosomal recessive disease caused by defects in the AGXT gene that encodes the enzyme alanine-glyoxylate aminotransferase. This results in a defect in glyoxylate metabolism and the accumulation of the toxic metabolite oxalate. One approach to treating this disease is to reduce the expression of the enzyme glycolate oxidase (GO) that produces glyoxylate from glycolate and thereby reducing the amount of substrate (glyoxylate) available for the formation of oxalate. PH1 can be modeled in mice in which both copies of the AGXT gene have been knocked out (agxt −/− mice) resulting in a significant 3-fold increase in oxalate levels in the urine compared to wild type controls. The agxt −/− mice can therefore be used to assess the efficacy of a novel base editor designed to create a stop codon in the coding sequence of the endogenous mouse GO gene. To identify a BE system and a guide that is optimal for introducing stop codons in the GO gene, a screen may be performed in a mouse liver cell line such as Hepa1-6 cells. In silico screening may first be used to identify guides that target the GO gene with the various BE systems available. To select among the large number of possible guides an in-silico analysis may be performed to determine which guides have an editing window that encompasses a sequence that when edited may create a stop codon. Preference may then be given to those guides that are closer to the 5′ end of the coding sequence. The resulting set of guides and BE proteins may be combined to form a ribonucleoprotein complex (RNP) and may be nucleofected in to Hepa1-6 cells. After 72 h, the efficiency of editing at the target site may be determined by NGS analysis. Based on these in vitro results the one or more BE/guide combinations that resulted in the highest frequency of stop codon formation may be selected for in vivo testing in mice.

[0238] The BE and guide may be delivered to the mice using an AAV virus with a split intein system to express the BE and a 3rd AAV to deliver the guide. Alternatively, an Adenovirus type 5 may be used to deliver the BE and guide in a single virus because of the >40 Kb packaging capacity of Adenovirus. Further, the BE may be delivered as a mRNA together with the guide RNA packaged in an appropriate LNP. After intravenous injection of the LNP into the agxt −/− mice the oxalate levels in the urine may be monitored over time to determine if oxalate levels were reduced which may indicate that the BE was active and had the expected therapeutic effect. To determine if the BE had introduced the stop codons, the appropriate region of the GO gene can be PCR amplified from the genomic DNA extracted from livers of treated and control mice. The resultant PCR product can be sequenced using Next Generation Sequencing to determine the frequency of the sequence changes.

### Example 10.—Gene Discovery of New Deaminases

[0239] 4 Tbp (tera base pairs) of proprietary and public assembled metagenomic sequencing data from diverse environments (soil, sediments, groundwater, thermophilic, human, and non-human microbiomes) were mined to discover novel deaminases. HMM profiles of known deaminases were built and searched against all predicted proteins using HMMER3 (hmmer.org) to identify deaminases from our databases. Predicted and reference (e.g., eukaryotic APOBEC1, bacterial TadA) deaminases were aligned with MAFFT and a phylogenetic tree was inferred using FastTree2. Novel families and subfamilies were defined by identifying clades composed of sequences disclosed herein. Candidates were selected based on the presence of critical catalytic residues indicative of enzymatic function (see e.g. SEQ ID NOs: 1-51, 385-386, 387-443, 444-447, or 488-475).

### Example 11.—Plasmid Construction

[0240] DNA fragments of genes were synthesized at either Twist Bioscience or Integrated DNA Technologies (IDT). Plasmid DNA was amplified in Endura electrocompetent cells (Lucigen) and isolated by QIAprep Spin Miniprep Kit (Qiagen). Vector backbones were prepared by restriction enzyme digestion of plasmids. Inserts were amplified by Q5 High-Fidelity DNA polymerase (New England Biolabs) using primers ordered either from Elim BIOPHARM or IDT. Both vector backbones and inserts were purified by gel extraction using the Gel DNA Recovery Kit (Zymo Research). One or multiple DNA fragments were assembled into the vectors through NEBuilder HiFi DNA assembly (New England Biolabs) (SEQ ID NOs. 483-487).

### Example 12.—Assessment of Base Edit Efficiency in E. coli by Sequencing

[0241] 5 ng extracted DNA prepared as in Example 4 was used as the template and primers (P137 and P360) were used for PCR amplification, and the resulting products were submitted for Sanger sequencing at ELIM BIOPHARM. Primers used for sequencing are shown in Tables 6 and 7 (Seq ID NOs. 523-531).

TABLE 6
Primers used for base editing analysis of lacZ gene in E. coli

| | SEQ | | |
|---|---|---|---|
| Name | ID NO. | Description | Sequence (5′→3′) |
| P137 | 523 | Forward primer used to amplify | CCAGGCTTTACACTTTATGCT |
| | | lacZ | |
| P360 | 524 | Reverse primer used to amplify | CGAACATCCAAAAGTTTGTGTTTTT |
| | | lacZ | |
| P137 | 523 | Sanger sequencing primer of | CCAGGCTTTACACTTTATGCT |
| | | MGA1-4_site 1 | |
| P137 | 523 | Sanger sequencing primer of | CCAGGCTTTACACTTTATGCT |
| | | MGA1-4_site 2 | |
| P361 | 528 | Sanger sequencing primer of | TGAGCGCATTTTTACGCGC |
| | | MGA1-4_site 3 | |
| P361 | 528 | Sanger sequencing primer of | TGAGCGCATTTTTACGCGC |
| | | MGA1-6_site 1 | |
| P361 | 528 | Sanger sequencing primer of | TGAGCGCATTTTTACGCGC |
| | | MGA1-6_site 2 | |
| P361 | 528 | Sanger sequencing primer of | TGAGCGCATTTTTACGCGC |
| | | MGA1-6_site 3 | |
| P361 | 528 | Sanger sequencing primer of | TGAGCGCATTTTTACGCGC |
| | | MGA3-6_site 1 | |
| P363 | 529 | Sanger sequencing primer of | GAAAACGGCAACCCGTGG |
| | | MGA3-6_site 2 | |
| P360 | 524 | Sanger sequencing primer of | CGAACATCCAAAAGTTTGTGTTTTT |
| | | MGA3-6_site 3 | |
| P137 | 523 | Sanger sequencing primer of | CCAGGCTTTACACTTTATGCT |
| | | MGA3-7_site 1 | |
| P361 | 528 | Sanger sequencing primer of | TGAGCGCATTTTTACGCGC |
| | | MGA3-7_site 2 | |
| P361 | 528 | Sanger sequencing primer of | TGAGCGCATTTTTACGCGC |
| | | MGA3-7_site 3 | |
| P137 | 523 | Sanger sequencing primer of | CCAGGCTTTACACTTTATGCT |
| | | MGA3-8_site 1 | |
| P361 | 528 | Sanger sequencing primer of | TGAGCGCATTTTTACGCGC |
| | | MGA3-8_site 2 | |
| P363 | 529 | Sanger sequencing primer of | GAAAACGGCAACCCGTGG |
| | | MGA3-8_site 3 | |
| P139 | 526 | Sanger sequencing primer of | GTATGTGGTGGATGAAGCC |
| | | MGA4-2_site 1 | |
| P363 | 529 | Sanger sequencing primer of | GAAAACGGCAACCCGTGG |
| | | MGA4-2_site 2 | |
| P360 | 524 | Sanger sequencing primer of | CGAACATCCAAAAGTTTGTGTTTTT |
| | | MGA4-2_site 3 | |
| P361 | 528 | Sanger sequencing primer of | TGAGCGCATTTTTACGCGC |
| | | MGA4-5_Site 1 | |
| P361 | 528 | Sanger sequencing primer of | TGAGCGCATTTTTACGCGC |
| | | MGA4-5_Site 2 | |
| P461 | 530 | Sanger sequencing primer of | GGATTGAAAATGGTCTGCTG |
| | | MGA4-5_Site 3 | |
| P137 | 523 | Sanger sequencing primer of | CCAGGCTTTACACTTTATGCT |
| | | MGA7-1_site 1 | |
| P361 | 528 | Sanger sequencing primer of | TGAGCGCATTTTTACGCGC |
| | | MGA7-1_site 2 | |
| P461 | 530 | Sanger sequencing primer of | GGATTGAAAATGGTCTGCTG |
| | | MGA7-1_site 3 | |
| P139 | 526 | Sanger sequencing primer of | GTATGTGGTGGATGAAGCC |
| | | MGA14-1_site 1 | |
| P363 | 529 | Sanger sequencing primer of | GAAAACGGCAACCCGTGG |
| | | MGA14-1_site 2 | |
| P360 | 524 | Sanger sequencing primer of | CGAACATCCAAAAGTTTGTGTTTTT |
| | | MGA14-1_site 3 | |
| P137 | 523 | Sanger sequencing primer of | CCAGGCTTTACACTTTATGCT |
| | | MGA15-1_site 1 | |
| P361 | 528 | Sanger sequencing primer of | TGAGCGCATTTTTACGCGC |
| | | MGA15-1_site 2 | |
| P140 | 527 | Sanger sequencing primer of | TTGTGGAGCGACATCCAG |
| | | MGA15-1_site 3 | |
| P137 | 523 | Sanger sequencing primer of | CCAGGCTTTACACTTTATGCT |
| | | MGA16-1_site 1 | |
| P361 | 528 | Sanger sequencing primer of | TGAGCGCATTTTTACGCGC |
| | | MGA16-1_site 2 | |
| P361 | 528 | Sanger sequencing primer of | TGAGCGCATTTTTACGCGC |
| | | MGA16-1_site 3 | |
| P361 | 528 | Sanger sequencing primer of | TGAGCGCATTTTTACGCGC |
| | | MGA18-1_site 1 | |
| P363 | 529 | Sanger sequencing primer of | GAAAACGGCAACCCGTGG |
| | | MGA18-1_site 2 | |
| P462 | 531 | Sanger sequencing primer of | ACTGCTGACGCCGCTGCG |
| | | MGA18-1_site 3 | |
| P363 | 529 | Sanger sequencing primer of | GAAAACGGCAACCCGTGG |
| | | ABE8.17_site 1 | |
| P137 | 523 | Sanger sequencing primer of | CCAGGCTTTACACTTTATGCT |
| | | ABE8.17_site 2 | |
| P139 | 526 | Sanger sequencing primer of | GTATGTGGTGGATGAAGCC |
| | | ABE8.17_site 3 | |
| P137 | 523 | Sanger sequencing primer of | CCAGGCTTTACACTTTATGCT |
| | | MGC1-4_site 1 | |
| P137 | 523 | Sanger sequencing primer of | CCAGGCTTTACACTTTATGCT |
| | | MGC1-4_site 2 | |
| P361 | 528 | Sanger sequencing primer of | TGAGCGCATTTTTACGCGC |
| | | MGC1-4_site 3 | |
| P137 | 523 | Sanger sequencing primer of | CCAGGCTTTACACTTTATGCT |
| | | MGC1-6_site 1 | |
| P137 | 523 | Sanger sequencing primer of | CCAGGCTTTACACTTTATGCT |
| | | MGC1-6_site 2 | |
| P361 | 528 | Sanger sequencing primer of | TGAGCGCATTTTTACGCGC |
| | | MGC1-6_site 3 | |
| P138 | 525 | Sanger sequencing primer of | CCGAAAGGCGCGGTGCCG |
| | | MGC3-6_site 1 | |
| P361 | 528 | Sanger sequencing primer of | TGAGCGCATTTTTACGCGC |
| | | MGC3-6_site 2 | |
| P360 | 524 | Sanger sequencing primer of | CGAACATCCAAAAGTTTGTGTTTTT |
| | | MGC3-6_site 3 | |
| P137 | 523 | Sanger sequencing primer of | CCAGGCTTTACACTTTATGCT |
| | | MGC3-7_site 1 | |
| P137 | 523 | Sanger sequencing primer of | CCAGGCTTTACACTTTATGCT |
| | | MGC3-7_site 2 | |
| P137 | 523 | Sanger sequencing primer of | CCAGGCTTTACACTTTATGCT |
| | | MGC3-7_site 3 | |
| P137 | 523 | Sanger sequencing primer of | CCAGGCTTTACACTTTATGCT |
| | | MGC3-8_site 1 | |
| P361 | 528 | Sanger sequencing primer of | TGAGCGCATTTTTACGCGC |
| | | MGC3-8_site 2 | |
| P361 | 528 | Sanger sequencing primer of | TGAGCGCATTTTTACGCGC |
| | | MGC3-8_site 3 | |
| P361 | 528 | Sanger sequencing primer of | TGAGCGCATTTTTACGCGC |
| | | MGC4-2_site 1 | |
| P139 | 526 | Sanger sequencing primer of | GTATGTGGTGGATGAAGCC |
| | | MGC4-2_site 2 | |
| P363 | 529 | Sanger sequencing primer of | GAAAACGGCAACCCGTGG |
| | | MGC4-2_site 3 | |
| P137 | 523 | Sanger sequencing primer of | CCAGGCTTTACACTTTATGCT |
| | | MGC4-5_site 1 | |
| P361 | 528 | Sanger sequencing primer of | TGAGCGCATTTTTACGCGC |
| | | MGC4-5_site 2 | |
| P139 | 526 | Sanger sequencing primer of | GTATGTGGTGGATGAAGCC |
| | | MGC4-5_site 3 | |
| P361 | 528 | Sanger sequencing primer of | TGAGCGCATTTTTACGCGC |
| | | MGC7-1_site 1 | |
| P461 | 530 | Sanger sequencing primer of | GGATTGAAAATGGTCTGCTG |
| | | MGC7-1_site 2 | |
| P139 | 526 | Sanger sequencing primer of | GTATGTGGTGGATGAAGCC |
| | | MGC7-1_site 3 | |
| P137 | 523 | Sanger sequencing primer of | CCAGGCTTTACACTTTATGCT |
| | | MGC14-1_site 1 | |
| P139 | 526 | Sanger sequencing primer of | GTATGTGGTGGATGAAGCC |
| | | MGC14-1_site 2 | |
| P139 | 526 | Sanger sequencing primer of | GTATGTGGTGGATGAAGCC |
| | | MGC14-1_site 3 | |
| P361 | 528 | Sanger sequencing primer of | TGAGCGCATTTTTACGCGC |
| | | MGC15-1_site 1 | |
| P461 | 530 | Sanger sequencing primer of | GGATTGAAAATGGTCTGCTG |
| | | MGC15-1_site 2 | |
| P139 | 526 | Sanger sequencing primer of | GTATGTGGTGGATGAAGCC |
| | | MGC15-1_site 3 | |
| P137 | 523 | Sanger sequencing primer of | CCAGGCTTTACACTTTATGCT |
| | | MGC16-1_site 1 | |
| P137 | 523 | Sanger sequencing primer of | CCAGGCTTTACACTTTATGCT |
| | | MGC16-1_site 2 | |
| P361 | 528 | Sanger sequencing primer of | TGAGCGCATTTTTACGCGC |
| | | MGC16-1_site 3 | |
| P361 | 528 | Sanger sequencing primer of | TGAGCGCATTTTTACGCGC |
| | | MGC18-1_site 1 | |
| P139 | 526 | Sanger sequencing primer of | GTATGTGGTGGATGAAGCC |
| | | MGC18-1_site 2 | |
| P363 | 529 | Sanger sequencing primer of | GAAAACGGCAACCCGTGG |
| | | MGC18-1_site 3 | |
| P363 | 529 | Sanger sequencing primer of | GAAAACGGCAACCCGTGG |
| | | BE3_site 1 | |
| P360 | 524 | Sanger sequencing primer of | CGAACATCCAAAAGTTTGTGTTTTT |
| | | BE3_site 2 | |
| P137 | 523 | Sanger sequencing primer of | CCAGGCTTTACACTTTATGCT |
| | | BE3_site 3 | |

TABLE 7
Primers used for base editing analysis of the effect of uracil glycosylase
inhibitor (UGI) in E. coli

| | SEQ | | |
|---|---|---|---|
| Name | ID NO. | Description | Sequence (5′→3′) |
| P137 | 523 | Forward primer used to amplify | CCAGGCTTTACACTTTATGCT |
| | | lacZ | |
| P360 | 524 | Reverse primer used to amplify | CGAACATCCAAAAGTTTGTGTTTTT |
| | | lacZ | |
| P461 | 530 | Sanger sequencing primer of lacZ | GGATTGAAAATGGTCTGCTG |
| | | site | |

[0242] FIGS. 8A-8C show example base edits by enzymes interrogated by this experiment, as assessed by Sanger sequencing.

[0243] FIGS. 10A-10B show base editing efficiencies of adenine base editors (ABEs) using TadA (ABE8.17m) (SEQ ID NO: 596) and MG nickases according to Table 3. TadA is a tRNA adenine deaminase; TadA (ABE8.17m) is an engineered variant of E. coli TadA. Twelve MG nickases fused with TadA (ABE8.17m) were constructed and tested in E. coli. Three guides were designed to target lacZ. Numbers shown in boxes indicate percentages of A to G conversion quantified by Edit R at each position. ABE8.17m was used as the positive control for the experiment.

[0244] FIGS. 11A-11B show base editing efficiencies of cytosine base editors (CBEs) comprising rat APOBEC1, MG nickases, and uracil glycosylase inhibitor of Bacillus subtilis bacteriophage (UGI (PBS1)). APOBEC1 is a cytosine deaminase. 12 MG nickases fused with rAPOBEC1 on N-terminus and UGI on C-terminus were constructed and tested in E. coli. Three guides were designed to target lacZ. Numbers shown in boxes indicate percentages of C to T conversion quantified by Edit R. BE3 was used as the positive control in the experiment.

[0245] FIG. 12 shows effects of MG uracil glycosylase inhibitors (UGIs) on base editing activity when added to CBEs. (a) MGC15-1 comprises of N-terminal APOBEC1, MG15-1 nickase, and C-terminal UGI. Three MG UGIs were tested for improvements of cytosine base editing activities in E. coli. (b) BE3 comprises N-terminal rAPOBEC1, SpCas9 nickase, and C-terminal UGI. Two MG UGIs were tested for improvements of cytosine base editing activities in HEK293T cells. Editing efficiencies were quantified by Edit R.

### Example 13.—Cell Culture, Transfections, Next Generation Sequencing, and Base Edit Analysis

[0246] HEK293T cells were grown and passaged in Dulbecco's Modified Eagle's Medium plus GlutaMAX (Gibco) supplemented with 10% (v/v) fetal bovine serum (Gibco) at 37° C. with 5% CO₂. 5×10⁴ cells were seeded on 96-well cell culture plates treated for cell attachment (Costar), grown for 20 to 24 h, and the spent media were refreshed with new media right before transfection. 200 ng expression plasmid and 1 μL lipofectamine 2000 (ThermoFisher Scientific) were used for transfection per well per manufacturer's instructions. Transfected cells were grown for 3 days, harvested, and gDNA was extracted with QuickExtract (Lucigen) per manufacturer's instructions. Targeted regions for base edits were amplified using Q5 High-Fidelity DNA polymerase (New England Biolabs) with primers listed in Tables 8 and 9 (SEQ ID NOs. 538-585) and extracted DNA as the templates.

TABLE 8
Primers used for base edit analysis of the effect of UGI in HEK293T

| | SEQ | | |
|---|---|---|---|
| Name | ID NO. | Description | Sequence (5′→3′) |
| P577 | 536 | Forward primer used to amplify the | GAGGCTGGAGAGGCCCGT |
| | | targeted region | |
| P578 | 537 | Reverse primer used to amplify the | GATTTTCATGCAGGTGCTGAAA |
| | | targeted region | |
| P577 | 536 | Sanger sequencing primer | GAGGCTGGAGAGGCCCGT |

TABLE 9a
Primers used to amplify targeted regions in HEK293T cells transfected with
A0A2K5RND7-MG nickase-MG69-l

| | SEQ | | |
|---|---|---|---|
| Name | ID NO. | Description | Sequence (5′→3′) |
| P969 | 538 | Forward primer used to amplify | GCTCTTCCGATCTNNNNNAGGAG |
| | | A0A2K5RDN7-nSpCas9(D10A)- | GAAGGGCCTGAGT |
| | | MG69-1_site 1 | |
| P970 | 539 | Reverse primer used to amplify | GCTCTTCCGATCTNNNNNTCTGC |
| | | A0A2K5RDN7-nSpCas9(D10A)- | CCTCGTGGGTTTG |
| | | MG69-1_site 1 | |
| P971 | 540 | Forward primer used to amplify | GCTCTTCCGATCTNNNNNCTCTG |
| | | A0A2K5RDN7-nSpCas9(D10A)- | GCCACTCCCTGGC |
| | | MG69-1_site 2 | |
| P972 | 541 | Reverse primer used to amplify | GCTCTTCCGATCTNNNNNGGCAG |
| | | A0A2K5RDN7-nSpCas9(D10A)- | GCTCTCCGAGGAG |
| | | MG69-1_site 2 | |
| P973 | 542 | Forward primer used to amplify | GCTCTTCCGATCTNNNNNGGGAA |
| | | A0A2K5RDN7-nSpCas9(D10A)- | TAATAAAAGTCTCTCTCTTAA |
| | | MG69-1_site 3 | |
| P974 | 543 | Reverse primer used to amplify | GCTCTTCCGATCTNNNNNCCCCC |
| | | A0A2K5RDN7-nSpCas9(D10A)- | TCCACCAGTACCC |
| | | MG69-1_site 3 | |
| P975 | 544 | Forward primer used to amplify | GCTCTTCCGATCTNNNNNCCTGT |
| | | A0A2K5RDN7-nSpCas9(D10A)- | CCTTGGAGAACCG |
| | | MG69-1_site 4 | |
| P976 | 545 | Reverse primer used to amplify | GCTCTTCCGATCTNNNNNGCAGG |
| | | A0A2K5RDN7-nSpCas9(D10A)- | TGAACACAAGAGCT |
| | | MG69-1_site 4 | |
| P977 | 546 | Forward primer used to amplify | GCTCTTCCGATCTNNNNNGAAGG |
| | | A0A2K5RDN7-nSpCas9(D10A)- | TGTGGTTCCAGAAC |
| | | MG69-1_site 5 | |
| P978 | 547 | Reverse primer used to amplify | GCTCTTCCGATCTNNNNNTCGAT |
| | | A0A2K5RDN7-nSpCas9(D10A)- | GTCCTCCCCATTG |
| | | MG69-1_site 5 | |
| P979 | 548 | Forward primer used to amplify | GCTCTTCCGATCTNNNNNAAACA |
| | | A0A2K5RDN7-nMG1-4(D9A)- | GGCTAGACATAGGGA |
| | | MG69-1_site 1 | |
| P980 | 549 | Reverse primer used to amplify | GCTCTTCCGATCTNNNNNGAAGC |
| | | A0A2K5RDN7-nMG1-4(D9A)- | CACCAGAGTCTCTA |
| | | MG69-1_site 1 | |
| P981 | 550 | Forward primer used to amplify | GCTCTTCCGATCTNNNNNGCCGC |
| | | A0A2K5RDN7-nMG1-4(D9A)- | CATTGACAGAGGG |
| | | MG69-1_site 2 | |
| P982 | 551 | Reverse primer used to amplify | GCTCTTCCGATCTNNNNNGCATC |
| | | A0A2K5RDN7-nMG1-4(D9A)- | AAAACAAAAGGGAGATTG |
| | | MG69-1_site 2 | |
| P983 | 552 | Forward primer used to amplify | GCTCTTCCGATCTNNNNNCCTCT |
| | | A0A2K5RDN7-nMG1-4(D9A)- | GCCCACCTCACTT |
| | | MG69-1_site 3 | |
| P984 | 553 | Reverse primer used to amplify | GCTCTTCCGATCTNNNNNGCCAT |
| | | A0A2K5RDN7-nMG1-4(D9A)- | GTGGGTTAATCTGG |
| | | MG69-1_site 3 | |
| P985 | 554 | Forward primer used to amplify | GCTCTTCCGATCTNNNNNCCGGA |
| | | A0A2K5RDN7-nMG1-4(D9A)- | CGCACCTACCCAT |
| | | MG69-1_site 4 | |
| P986 | 555 | Reverse primer used to amplify | GCTCTTCCGATCTNNNNNCTAGA |
| | | A0A2K5RDN7-nMG1-4(D9A)- | TGGGAATGGATGGG |
| | | MG69-1_site 4 | |
| P987 | 556 | Forward primer used to amplify | GCTCTTCCGATCTNNNNNAACCA |
| | | A0A2K5RDN7-nMG3-6(D13A)- | CAAACCCACGAGG |
| | | MG69-1_site 1 | |
| P988 | 557 | Reverse primer used to amplify | GCTCTTCCGATCTNNNNNTCAAT |
| | | A0A2K5RDN7-nMG3-6(D13A)- | GGCGGCCCCGGGC |
| | | MG69-1_site 1 | |
| P989 | 558 | Forward primer used to amplify | GCTCTTCCGATCTNNNNNAGTGA |
| | | A0A2K5RDN7-nMG3-6(D13A)- | TCCCCAGTGTCCC |
| | | MG69-1_site 2 | |
| P990 | 559 | Reverse primer used to amplify | GCTCTTCCGATCTNNNNNGCCCT |
| | | A0A2K5RDN7-nMG3-6(D13A)- | GAACGCGTTTGCT |
| | | MG69-1_site 2 | |
| P991 | 560 | Forward primer used to amplify | GCTCTTCCGATCTNNNNNTGGGA |
| | | A0A2K5RDN7-nMG3-6(D13A)- | ATAATAAAAGTCTCTCTCT |
| | | MG69-1_site 3 | |
| P992 | 561 | Reverse primer used to amplify | GCTCTTCCGATCTNNNNNGCCCT |
| | | A0A2K5RDN7-nMG3-6 D13A)- | CCACCAGTACCCC |
| | | MG69-1_site 3 | |
| P993 | 562 | Forward primer used to amplify | GCTCTTCCGATCTNNNNNCAGGG |
| | | A0A2K5RDN7-nMG3-6(D13A)- | CCTCCTCAGCCCA |
| | | MG69-1_site 4 | |
| P994 | 563 | Reverse primer used to amplify | GCTCTTCCGATCTNNNNNGTCTG |
| | | A0A2K5RDN7-nMG3-6(D13A)- | GATGTCGTAAGGGAA |
| | | MG69-1_site 4 | |
| P995 | 564 | Forward primer used to amplify | GCTCTTCCGATCTNNNNNGGGGT |
| | | A0A2K5RDN7-nMG3-6(D13A)- | GTAACTCAGAATGTTTT |
| | | MG69-1_site 5 | |
| P996 | 565 | Reverse primer used to amplify | GCTCTTCCGATCTNNNNNGGGAG |
| | | A0A2K5RDN7-nMG3-6(D13A)- | TGAGACTCAGAGA |
| | | MG69-1_site 5 | |
| P997 | 566 | Forward primer used to amplify | GCTCTTCCGATCTNNNNNGCAAA |
| | | A0A2K5RDN7-nMG3-6(D13A)- | GAGGGAAATGAGATCA |
| | | MG69-1_site 6 | |
| P998 | 567 | Reverse primer used to amplify | GCTCTTCCGATCTNNNNNGTGAC |
| | | A0A2K5RDN7-nMG3-6(D13A)- | ACATTTGTTTGAGAATCA |
| | | MG69-1_site 6 | |
| P999 | 568 | Forward primer used to amplify | GCTCTTCCGATCTNNNNNCTTTA |
| | | A0A2K5RDN7-nMG3-6(D13A)- | TCCCCGCACAGAG |
| | | MG69-1_site 7 | |
| P1000 | 569 | Reverse primer used to amplify | GCTCTTCCGATCTNNNNNCTTGG |
| | | A0A2K5RDN7-nMG3-6(D13A)- | CCCATGGGAAATC |
| | | MG69-1_site 7 | |
| P1001 | 570 | Forward primer used to amplify | GCTCTTCCGATCTNNNNNGTCCC |
| | | A0A2K5RDN7-nMG4-2(D28A)- | ATCCCAACACCCC |
| | | MG69-1_site 1 | |
| P1002 | 571 | Reverse primer used to amplify | GCTCTTCCGATCTNNNNNTGGGC |
| | | A0A2K5RDN7-nMG4-2(D28A)- | ATGTGTGCTCCCA |
| | | MG69-1_site 1 | |
| P1003 | 572 | Forward primer used to amplify | GCTCTTCCGATCTNNNNNCTATG |
| | | A0A2K5RDN7-nMG4-2(D28A)- | GGAATAATAAAAGTCTCTC |
| | | MG69-1_site 2 | |
| P1004 | 573 | Reverse primer used to amplify | GCTCTTCCGATCTNNNNNCTCCA |
| | | A0A2K5RDN7-nMG4-2(D28A)- | CCAGTACCCCACC |
| | | MG69-1_site 2 | |
| P1005 | 574 | Forward primer used to amplify | GCTCTTCCGATCTNNNNNGGACC |
| | | A0A2K5RDN7-nMG4-2(D28A)- | CTGGTCTCTACCT |
| | | MG69-1_site 3 | |
| P1006 | 575 | Reverse primer used to amplify | GCTCTTCCGATCTNNNNNCCTCT |
| | | A0A2K5RDN7-nMG4-2(D28A)- | CCCATTGAACTACC |
| | | MG69-1_site 3 | |
| P1007 | 576 | Forward primer used to amplify | GCTCTTCCGATCTNNNNNCCCCA |
| | | A0A2K5RDN7-nMG4-2(D28A)- | GTGACTCAGGGCC |
| | | MG69-1_site 4 | |
| P1008 | 577 | Reverse primer used to amplify | GCTCTTCCGATCTNNNNNTCGTA |
| | | A0A2K5RDN7-nMG4-2(D28A)- | AGGGAAAGACTTAGGAA |
| | | MG69-1_site 4 | |
| P1009 | 578 | Forward primer used to amplify | GCTCTTCCGATCTNNNNNTCTCC |
| | | A0A2K5RDN7-nMG18-1(D12A)- | CTTTTGTTTTGATGCATTT |
| | | MG69-1_site 1 | |
| P1010 | 579 | Reverse primer used to amplify | GCTCTTCCGATCTNNNNNCCACC |
| | | A0A2K5RDN7-nMG18-1(D12A)- | CCAGGCTCTGGGG |
| | | MG69-1_site 1 | |
| P1011 | 580 | Forward primer used to amplify | GCTCTTCCGATCTNNNNNCCTTT |
| | | A0A2K5RDN7-nMG18-1(D12A)- | TGTTTTGATGCATTTCTGTTT |
| | | MG69-1_site 2 | |
| P1012 | 581 | Reverse primer used to amplify | GCTCTTCCGATCTNNNNNAATCT |
| | | A0A2K5RDN7-nMG18-1(D12A)- | ACCACCCCAGGCT |
| | | MG69-1_site 2 | |
| P1013 | 582 | Forward primer used to amplify | GCTCTTCCGATCTNNNNNATCCC |
| | | A0A2K5RDN7-nMG18-1(D12A)- | CAGTGTCCCCCTT |
| | | MG69-1_site 3 | |
| P1014 | 583 | Reverse primer used to amplify | GCTCTTCCGATCTNNNNNCCAGG |
| | | A0A2K5RDN7-nMG18-1(D12A)- | CCCTGAACGCGTT |
| | | MG69-1_site 3 | |
| P1015 | 584 | Forward primer used to amplify | GCTCTTCCGATCTNNNNNAGGCC |
| | | A0A2K5RDN7-nMG18-1(D12A)- | AGGCCTGCGGGGG |
| | | MG69-1_site 4 | |
| P1016 | 585 | Reverse primer used to amplify | GCTCTTCCGATCTNNNNNCCAAA |
| | | A0A2K5RDN7-nMG18-1(D12A)- | AACTCCCAAATTAGCAAA |
| | | MG69-1_site 4 | |

[0247] PCR products were purified using the HighPrep PCR Clean-up System (MAGBIO) per manufacturer's instructions. The effect of uracil glycosylase inhibitor (UGI) on base editing of candidate enzymes was analyzed by submitting PCR products to Elim BIOPHARM for Sanger sequencing, and the efficiency was quantified by Edit R. To analyze base editing of A0A2K5RND7-MG nickase-MG69-1, adapters used for next generation sequencing (NGS) were appended to PCR products by subsequent PCR reactions using KAPA HiFi HotStart ReadyMix PCR Kit (Roche) and primers compatible with TruSeq DNA Library Prep Kits (illumina). DNA concentrations of the resulting products were quantified by TapeStation (Agilent), and samples were pooled together to prepare the library for NGS analysis. The resulting library was quantified by qPCR with Aria Real-time PCR System (Agilent) and high through sequencing was performed with an Illumina Miseq instrument per manufacturer's instructions. Sequencing data was analyzed for base edits by Cripresso2.

[0248] FIGS. 13A-13B show maps of sites targeted by base editors showing base editing efficiencies of cytosine base editors comprising CMP/dCMP-type deaminase domain-containing protein (uniprot accession A0A2K5RDN7), MG nickases, and MG UGI. The constructs comprise N-terminal A0A2K5RDN7, MG nickases, and C-terminal MG69-1. For simplicity, only the identities of MG nickases are shown in the figure. BE3 (APOBEC1) was used as a positive control for base editing. An empty vector was used for the negative control. Three independent experiments were performed on different days. Abbreviations: R, repeat; NEG, negative control.

TABLE 9b
Protein Domains used in constructs in Example 13

| | | | | Linker | | | Linker |
|---|---|---|---|---|---|---|---|
| | | | | (Deaminase- | | | (Nickase- |
| Candidate | Type | PAM | Deaminase | Nickase) | Nickase | UGI | UGI) |
| A0A2K5RDN7- | II | nnRGGnT | A0A2K5RDN7 | SGSETPGT | nMG3-6(D13A) | MG69-1 | SGGSS |
| nMG3-6- | | SEQ ID | SEQ ID NO: 594 | SESATPES | SEQ ID NO: 71 | SEQ ID | |
| MG69-1 | | NO: 362 | | | | NO: 52 | |
| A0A2K5RDN7- | II | nRRR | A0A2K5RDN7 | SGSETPGT | nMG1-4 | MG69-1 | SGGSS |
| nMG1-4- | | SEQ ID | SEQ ID NO: 594 | SESATPES | SEQ ID NO:70 | SEQ ID | |
| MG69-1 | | NO: 360 | | | | NO: 52 | |
| A0A2K5RDN7- | II | nRWART | A0A2K5RDN7 | SGSETPGT | nMG18-1 | MG69-1 | SGGSS |
| nMG18-1- | | SEQ ID | SEQ ID NO: 594 | SESATPES | SEQ ID NO: 78 | SEQ ID | |
| MG69-1 | | NO: 368 | | | | NO: 52 | |

### Example 14.—Positive Selection of Base Editor Mutants in E. coli

[0249] FIG. 14 shows a positive selection method for TadA characterization in E. coli. Panel (a) shows a map of one plasmid system used for TadA selection. The vector comprises CAT (H193Y), a sgRNA expression cassette targeting CAT, and an ABE expression cassette. In this figure, N-terminal TadA from E. coli and a C-terminal SpCas9 (D10A) from Streptococcus pyogenes are shown. Panel (b) shows sequencing traces demonstrating that when introduced/transformed into E. coli cells, the A2 position of CAT (H193Y)'s template strand is edited, reverting the H193Y mutant to wild type and restoring its activity. Abbreviations: CAT, chloramphenicol acetyltransferase.

[0250] 1 μL of plasmid solution with a concentration of 10 ng/μL was transformed into 25 μL BL21 (DE3) electrocompetent cells (Lucigen), recovered with 975 μL expression recovery medium at 37° C. for 1 h. 50 μL of the resulting cells were spread on a LB agar plate containing 100 m/mL carbenicillin, 0.1 mM IPTG, and appropriate amount of chloramphenicol. The plate was incubated at 37° C. until colonies were pickable. Colony PCR were used to amplify the genomic region containing base edits, and the resulting products were submitted for Sanger sequencing at ELIM BIOPHARM. Primers used for PCR and sequencing are listed in Table 10 (SEQ ID NOs. 532-537).

TABLE 10
Primers used for base edit analysis of CAT (H193Y)

| | SEQ | | |
|---|---|---|---|
| Name | ID NO. | Description | Sequence (5′→3′) |
| P570 | 532 | Forward primer used to amplify CAT | CCGCCGCCGCAAGGAATGGTTT |
| | | (H193Y) of CAT (H193Y)-sgRNA- | AATTAATTTGATCGGCACGTAAG |
| | | MG68-4 variant-nSpCas9(D10A) | AGG |
| P1050 | 534 | Forward primer used to amplify CAT | AAGGAATGGTTTAATTAATTCTA |
| | | (H193Y) of CAT (H193Y)-sgRNA- | GATTAATTAATTTGATCGGCACG |
| | | MG68-4 variant-nMG34-1(D10A) | TAAG |
| P571 | 533 | Reverse primer used to amplify CAT | GGACTGTTGGGCGCCATCTCCTT |
| | | (H193Y) of CAT (H193Y)-sgRNA- | GCATGCTTCACTTATTCAGGCGT |
| | | MG68-4 variant-nSpCas9 | AGCA |
| P571 | 535 | Sanger sequencing primer of CAT | GGACTGTTGGGCGCCATCTCCT |
| | | (H193Y) | TGCATGCTTCACTTATTCAGGCG |
| | | | TAGCA |

[0251] FIG. 15 shows mutations caused by TadA enable high tolerance of chloramphenicol (Cm). Panel (a) shows photographs of growth plates where different concentrations of chloramphenicol were used to select for antibiotics resistance of E. coli. In this example, wild type and two variants of TadA from E. coli (EcTadA) were tested. Panel (b) shows a results summary table demonstrating that ABEs carrying mutated TadA show higher editing efficiencies than the wild type. In these experiments, colonies were picked from the plates with greater than or equal to 0.5 μg/mL Cm. For simplicity, only identities of deaminases are shown in the table, but effectors (SpCas9) and construct organization are shown in the figures above.

[0252] FIGS. 16A-16B show investigation of MG TadA activity in positive selection. FIG. 16A shows photographs of growth plates from an experiment where 8 MG68 TadA candidates were tested against 0 to 2 μg/mL of chloramphenicol (ABEs comprised N-terminal TadA variants and C-terminal SpCas9 (D10A) nickase). For simplicity, only identities of deaminases are shown. FIG. 16B shows a summary table depicting editing efficiencies of MG TadA candidates. Panel (b) demonstrates that MG68-3 and MG68-4 drove base edits of adenine. In this experiment, colonies were picked from the plates with greater than or equal to 0.5 μg/mL Cm.

[0253] FIG. 17 shows an improvement of base editing efficiency of MG68-4 nSpCas9 via D109N mutation on MG68-4. Panel (a) shows photographs of growth plates where wild type MG68-4 and its variant were tested against 0 to 4 μg/mL of chloramphenicol. For simplicity, only identities of deaminases are shown. Adenine base editors in this experiment comprise N-terminal TadA variants and C-terminal SpCas9 (D10A) nickase. Panel (b) shows a summary table depicting editing efficiencies of MG TadA candidates. Panel (b) demonstrates that MG68-4 and MG68-4 (D109N) showed base edits of adenine, with the D109N mutant showing increased activity. In this experiment, colonies were picked from the plates with greater than or equal to 0.5 μg/mL Cm.

[0254] FIG. 18 shows base editing of MG68-4 (D109N) nMG34-1. Panel (a) shows photographs of growth plates of an experiment where an ABE comprising N-terminal MG68-4 (D109N) and C-terminal SpCas9 (D10A) nickase was tested against 0 to 2 μg/mL of chloramphenicol. Panel (b) shows a summary table depicting editing efficiencies with and without sgRNA. In this experiment, colonies were picked from the plates with greater than or equal to 1 μg/mL Cm.

[0255] FIG. 19 shows 28 MG68-4 variants designed for improvements of MG68-4-nMG34-1 base editing activity. 12 residues were selected for targeted mutagenesis to improve editing of the enzymes.

[0256] While preferred embodiments of the present invention have been shown and described herein, it will be obvious to those skilled in the art that such embodiments are provided by way of example only. It is not intended that the invention be limited by the specific examples provided within the specification. While the invention has been described with reference to the aforementioned specification, the descriptions and illustrations of the embodiments herein are not meant to be construed in a limiting sense. Numerous variations, changes, and substitutions will now occur to those skilled in the art without departing from the invention. Furthermore, it shall be understood that all aspects of the invention are not limited to the specific depictions, configurations or relative proportions set forth herein which depend upon a variety of conditions and variables. It should be understood that various alternatives to the embodiments of the invention described herein may be employed in practicing the invention. It is therefore contemplated that the invention shall also cover any such alternatives, modifications, variations or equivalents. It is intended that the following claims define the scope of the invention and that methods and structures within the scope of these claims and their equivalents be covered thereby.

What is claimed is:

1. An engineered nucleic acid editing system, comprising:
(a) an endonuclease comprising a RuvC domain and an HNH domain, wherein said endonuclease is derived from an uncultivated microorganism, wherein said endonuclease is a class 2, type II Cas endonuclease, wherein said endonuclease is configured to be deficient in nuclease activity;
(b) a base editor coupled to said endonuclease; and
(c) an engineered guide ribonucleic acid structure configured to form a complex with said endonuclease comprising:
(i) a guide ribonucleic acid sequence configured to hybridize to a target deoxyribonucleic acid sequence; and
(ii) a ribonucleic acid sequence configured to bind to said endonuclease.

2. The engineered nucleic acid editing system of claim 1, wherein said RuvC domain lacks nuclease activity.

3. The engineered nucleic acid editing system of claim 1, wherein said endonuclease is configured to cleave one strand of a double-stranded target deoxyribonucleic acid.

4. The engineered nucleic acid editing system of claim 1, wherein said class 2, type II Cas endonuclease comprises a nickase mutation.

5. The engineered nucleic acid editing system of claim 1, wherein said endonuclease comprises a sequence with at least 80% sequence identity to SEQ ID NO: 597, or a variant thereof.

6. The engineered nucleic acid editing system of claim 1, wherein said class 2, type II Cas endonuclease comprises an aspartate to alanine mutation at residue 10 relative to SEQ ID NO: 597 when optimally aligned.

7. The engineered nucleic acid editing system of claim 1, wherein said endonuclease is configured to bind to a protospacer adjacent motif (PAM) sequence comprising any one of SEQ ID NOs: 598 or a variant thereof.

8. The engineered nucleic acid editing system of claim 7, wherein said base editor comprises a sequence having at least 80% identity to any one of SEQ ID NOs: 50-51, 385-443, or 448-475.

9. The engineered nucleic acid editing system of claim 7, wherein said endonuclease has less than 80% identity to a Cas9 endonuclease.

10. The engineered nucleic acid editing system of claim 1, wherein said engineered guide ribonucleic acid sequence comprises a sequence with at least 80% sequence identity to non-degenerate nucleotides of any one of SEQ ID NOs: 88-96 or 488-489 or a variant thereof.

11. The engineered nucleic acid editing system of claim 10, wherein said engineered ribonucleic acid sequence comprises a sequence with at least 80% sequence identity to non-degenerate nucleotides of SEQ ID NO: 489 or a variant thereof.

12. The engineered nucleic acid editing system of claim 1, wherein said base editor is an adenine deaminase.

13. The engineered nucleic acid editing system of claim 1, wherein said engineered guide ribonucleic acid structure comprises one ribonucleic acid polynucleotide comprising said guide ribonucleic acid sequence and said ribonucleic acid sequence configured to bind to an endonuclease.

14. The engineered nucleic acid editing system of claim 1, wherein said guide ribonucleic acid sequence is complementary to a eukaryotic, fungal, plant, mammalian, or human genomic sequence.

15. The engineered nucleic acid editing system of claim 1, wherein said guide ribonucleic acid sequence is 15-24 nucleotides in length.

16. The engineered nucleic acid editing system of claim 1, further comprising one or more nuclear localization sequences (NLSs) proximal to an N- or C-terminus of said endonuclease.

17. The engineered nucleic acid editing system of claim 1, wherein said endonuclease is covalently coupled directly to said base editor or covalently coupled to said base editor through a linker.

18. The engineered nucleic acid editing system of claim 17, wherein a polypeptide comprises said endonuclease and said base editor.

19. The engineered nucleic acid editing system of claim 18, wherein said polypeptide comprises a sequence with at least about 80% identity to SEQ ID NO: 476.

20. The engineered nucleic acid editing system of claim 19, wherein said identity is determined by said BLASTP homology search algorithm using parameters of a wordlength (W) of 3, an expectation (E) of 10, and a BLOSUM62 scoring matrix setting gap costs at existence of 11, extension of 1, and using a conditional compositional score matrix adjustment.

21. The engineered nucleic acid editing system of claim 1, wherein said endonuclease is configured to be catalytically dead.

22. A nucleic acid comprising an engineered nucleic acid sequence optimized for expression in an organism, wherein said nucleic acid encodes a class 2, type II Cas endonuclease coupled to a base editor, and wherein said endonuclease is derived from an uncultivated microorganism.

23. The nucleic acid of claim 22, wherein said engineered nucleic acid sequence encodes a polypeptide comprising a sequence with at least about 80% identity to SEQ ID NO: 476.

24. The nucleic acid of claim 22, wherein said endonuclease comprises an aspartate to alanine mutation at residue 10 relative to SEQ ID NO: 597 when optimally aligned.

25. A vector comprising a nucleic acid sequence encoding a class 2, type II Cas endonuclease coupled to a base editor, wherein said endonuclease is derived from an uncultivated microorganism.

26. The vector of claim 25, further comprising a nucleic acid encoding an engineered guide ribonucleic acid structure configured to form a complex with said endonuclease comprising:
a) a guide ribonucleic acid sequence configured to hybridize to a target deoxyribonucleic acid sequence; and
b) a ribonucleic acid sequence configured to binding to said endonuclease.

27. A method for modifying a double-stranded deoxyribonucleic acid polynucleotide comprising contacting said double-stranded deoxyribonucleic acid polynucleotide with a complex comprising:
(a) an endonuclease comprising a RuvC domain and an HNH domain, wherein said endonuclease is derived from an uncultivated microorganism, wherein said endonuclease is a class 2, type II Cas endonuclease, and wherein said RuvC domain lacks nuclease activity;
(b) a base editor coupled to said endonuclease; and
(c) an engineered guide ribonucleic acid structure configured to bind to said endonuclease and said double-stranded deoxyribonucleic acid polynucleotide;
wherein said double-stranded deoxyribonucleic acid polynucleotide comprises a protospacer adjacent motif (PAM).

28. The method of claim 27, wherein said endonuclease comprising a RuvC domain and an HNH domain is covalently coupled directly to said base editor or covalently coupled to said base editor through a linker.

29. The method of claim 27, wherein said endonuclease comprising a RuvC domain and an HNH domain comprises a sequence with at least 80% sequence identity to SEQ ID NO: 597 or a variant thereof.

30. The method of claim 27, wherein said endonuclease comprises an aspartate to alanine mutation at residue 10 relative to SEQ ID NO: 597 when optimally aligned.

The application's sequence listing, which the Patent Office published only in electronic form, follows.

SEQUENCE LISTING (593 sequences)

SEQ ID NO: 1 - protein, 186 aa, Unknown
  Description of Unknown: uncultivated organism
  Category: MG66 putative cytidine deaminase
  Description: MG66-2 deaminase
MARVLGLDPGFATCGYALVDLTRKDGAPFVDVRSLGTLRTAKADKKRKVLAADDNLRRAQELIRALYPLASNAQAIVAESMSFPRNSAAAAKMAMCWGIVATLAEMNDLPIVQATPKEIKIAVAGVGTATKEDVAAAVCAKCGRQFSEELLAQGLPKGMHEHAYDAVASVLACLNSDVLRAIRRAG

SEQ ID NO: 2 - protein, 164 aa, Unknown
  Description of Unknown: uncultivated organism
  Category: MG66 putative cytidine deaminase
  Description: MG66-3 deaminase
MDRLSLHQYAIALAWVAATRSEDPYTRVGCVALSEQGNVLATAYNGLKPKATFGPEFWNNRESRLPFMVHAEMNLVSLTKRNEVHTVAINILPCPTCAAFLATHGVQQVVYSEVYHRDKGTVGLTVLREYGVEIHHLPYYRVRPVFLDMDEAHRKVRSEQRTAA

SEQ ID NO: 3 - protein, 135 aa, Unknown
  Description of Unknown: uncultivated organism
  Category: MG66 putative cytidine deaminase
  Description: MG66-4 deaminase
MREYIQAARDEAAKSRCDRAHVGCVIVDRATGHVVSSAFNETPHGLEPCDTGGHRIVDNHCVNTVHAERNAIRKMTEHGSEYTLYVTHYPCQGCAHLIASCPEIVEVVYLGDYNNSSEATALLSGLSKGVHHGEE

SEQ ID NO: 4 - protein, 160 aa, Unknown
  Description of Unknown: uncultivated organism
  Category: MG66 putative cytidine deaminase
  Description: MG66-5 deaminase
MSNTQSLHTTFMHILFEFSKLSHCVSKQVAAMAVKDGRIISTGINGTAPGYTNCDDIFNKSDFNRELHHQFSNTYEIHAEMNMILYAAKNGISLDGATLYCSMLPCWNCIKHISVTGIKHIIYAKRYDMLSLEDEKNIYYYCKKLGITIQQFDPDTLGSF

SEQ ID NO: 5 - protein, 124 aa, Unknown
  Description of Unknown: uncultivated organism
  Category: MG66 putative cytidine deaminase
  Description: MG66-6 deaminase
MTSGILKLALEEAESSTYRFRVGAVVFKGSRILASGHNGIRSSRIHPLHKNYNNALHAEQDAILNVKDWSTLKGCSILVVKVSKTKGTISMAKPCPMCQQLLRHVGIKTMYFSNENGEIISEKL

SEQ ID NO: 6 - protein, 132 aa, Unknown
  Description of Unknown: uncultivated organism
  Category: MG66 putative cytidine deaminase
  Description: MG66-7 deaminase
MTKREIAYFNAAKAVSSLSDHKYKMGCVIVNKHRIISSGFNSETKCHRIQAELDMNEYKMHSSGKVHAETSALLSLRHIDLSKASIFIYRELKDGTKALARPCPCCQKLIRKAGIKHVYYTGNNSLIYEEFI

SEQ ID NO: 7 - protein, 142 aa, Unknown
  Description of Unknown: uncultivated organism
  Category: MG66 putative cytidine deaminase
  Description: MG66-8 deaminase
AAGDFVQVREYIKAARDEAAKSRCDRAHVGCVIVDRVTGRVVSRAFNETPHGLEPCDTGGHRMIDGHCVNTVHAERNAIRKMKEHESEYTLYVTHYPCQGCAHLIASCPEIVEVVYLGDYRNSKEATALLMGLSKGVHRGEE

SEQ ID NO: 8 - protein, 82 aa, Unknown
  Description of Unknown: uncultivated organism
  Category: MG66 putative cytidine deaminase
  Description: MG66-9 deaminase
HRIVDNHCVNTVHAERNAIRKMKEHGSEYTLYVTHYPCQGCAHLISSCPEIVEVVYLGDYRNSSEATALLSGLSKGVHRGEE

SEQ ID NO: 9 - protein, 115 aa, Unknown
  Description of Unknown: uncultivated organism
  Category: MG66 putative cytidine deaminase
  Description: MG66-10 deaminase
HVGCVIVDHATGQVVSSAFNETPPGLEPCDTGGHRIVDDHCVNTVHAERGAIRKMAEHGSEYTLYVTHYPCRGCAHLISSCPEIVEVVYLGDYNNSSEATDLLMSLSKGVHRAEE

SEQ ID NO: 10 - protein, 186 aa, Unknown; identical to SEQ ID NO: 1
  Description of Unknown: uncultivated organism
  Category: MG66 putative cytidine deaminase
  Description: MG66-11 deaminase

SEQ ID NO: 11 - protein, 232 aa, Unknown
  Description of Unknown: uncultivated organism
  Category: MG66 putative cytidine deaminase
  Description: MG66-12 deaminase
MDNLPKYEYLNVLDPERTGISETWLSYFMNIARVIATKSKDPSTKVGAVAVDTNTKRILATGYNGFPAGVKERPERWERPVKYSYIVHSEANIVASAARFGINLTGSTLFVTLHPCVDCAKIVASAGFKNVIYIDTEIKAQVGREWITLLQHSKNIFEESRIGLYACREVPAKKKEEPKLYKTYKGTVETTTELNNKRDKQLGDLVFVKSRNTLYEWNGVIWTVIGEYQHLL

SEQ ID NO: 12 - protein, 113 aa, Unknown
  Description of Unknown: uncultivated organism
  Category: MG66 putative cytidine deaminase
  Description: MG66-13 deaminase
MDNLPKYEYLNVLDPERTRISETWLSYFMNIARVIATKSKDPSTKVGAVAVDTNTKRILATGYNGFPAGVKERPERWERPVKYSYIVHSEANIVASAARFGINLTGSTLFVTL

SEQ ID NO: 13 - protein, 232 aa, Unknown
  Description of Unknown: uncultivated organism
  Category: MG66 putative cytidine deaminase
  Description: MG66-14 deaminase
MDNLPKYEYLNVLDPERTRISETWLSYFMNIARVIATKSKDPSTKVGAVAVDTNTKRILATGYNGFPAGVKERPERWERPVKYSYIVHSEANIVASAARFGINLTGSTLFVTLHPCVDCAKIVASAGFKNVIYIDTEIKPQVGREWITLLQHSKNIFEESRIGLYACREVPAKKKEEPKLYKTFKGTVETTVELNNKRDKQLGDLVFVKSRNTLYEWNGVIWTVIGEYQHLL

SEQ ID NO: 14 - protein, 164 aa, Unknown; identical to SEQ ID NO: 2
  Description of Unknown: uncultivated organism
  Category: MG66 putative cytidine deaminase
  Description: MG66-15 deaminase

SEQ ID NO: 15 - protein, 50 aa, Unknown
  Description of Unknown: uncultivated organism
  Category: MG66 putative cytidine deaminase
  Description: MG66-18 deaminase
MKQYIQAARDEAAKSRCDRAHVGCVIVDRATGQVVSRAFNETPHGLEPCD

SEQ ID NO: 16 - protein, 135 aa, Unknown
  Description of Unknown: uncultivated organism
  Category: MG66 putative cytidine deaminase
  Description: MG66-19 deaminase
MKQYIQAARDEAAKSRCDRAHVGCVIVDRATGQVVSRAFNETPHGLEPCDTGGHRIVDNHCVNTVHAERNAIRKMKEHGSEYTLYVTHYPCQGCAHLISSCPEIVEVVYLGDYRNSSEATALLSGLSKGVHRGEE

SEQ ID NO: 17 - protein, 135 aa, Unknown
  Description of Unknown: uncultivated organism
  Category: MG66 putative cytidine deaminase
  Description: MG66-20 deaminase
MKQYIQAARDEAAKSRCDRAHVGCVIVDRATGQVVSRAFNETPHGLEPCDTGGHRIVDNHCVNTVHAERNAIRQMKEHGSEYTLYVTHYPCQGCAHLISSCPEIIEVVYIGDYNNSSEATALLSGLSKGVHRGEE

SEQ ID NO: 18 - protein, 204 aa, Unknown
  Description of Unknown: uncultivated organism
  Category: MG66 putative cytidine deaminase
  Description: MG66-21 deaminase
MNIARVIATKSKDPSTKVGAVAVDTNTKRILATGYNGFPAGVKERPERWERPVKYSYIVHSEANIVASAARFGINLTGSTLFVTLHPCVDCAKIVASAGFKNVIYIDTEIKPQVGREWITLLQHSKNIFEESRIGLYACREVPAKKKEEPKLYKTFKGTVETTVELNNKRDKQLGDLIFVRSRNTLYEWNGVIWTVIGEYQHLL

SEQ ID NO: 19 - protein, 142 aa, Unknown
  Description of Unknown: uncultivated organism
  Category: MG66 putative cytidine deaminase
  Description: MG66-22 deaminase
MREFIKAARDEAAKSRCDRAHVGCVIVDRATGRVVSRAFNETPHGLEPCDTGGHRMIDGHCVNTVHAERGAIRKMQSHDSEYTLYVTHYPCQGCAHLIASCPDIVEVVYLGDYRNSNEATALLMGLSKGVHHAEEDCSSSPA

SEQ ID NO: 20 - protein, 142 aa, Unknown
  Description of Unknown: uncultivated organism
  Category: MG66 putative cytidine deaminase
  Description: MG66-23 deaminase
MREFIKAARDEAAKSRCDRAHVGCVIVDRATGRVVSRAFNETPHGLEPCDTGGHRMIDGHCVNTVHAERGAIRKMQSHDSEYTLYVTHYPCQGCAHLIASCPEIVEVVYLGDYRNSNEATALLMGLSKGVHHAEEDCSSSPA

SEQ ID NO: 21 - protein, 142 aa, Unknown
  Description of Unknown: uncultivated organism
  Category: MG66 putative cytidine deaminase
  Description: MG66-24 deaminase
MREFIKAARDEAAKSRCDRAHVGCVIVDRATGRVVSRAFNETPHGLEPCDTGGHRMIDGHCVNTVHAERGAIRKMQTHDSEYTLYVTHYPCQGCAHLIASCPEIVEVVYLGDYRNSNEATALLMGLSKGVHHAEEDCSSSPA

SEQ ID NO: 22 - protein, 142 aa, Unknown
  Description of Unknown: uncultivated organism
  Category: MG66 putative cytidine deaminase
  Description: MG66-25 deaminase
MREFIKAARDEAAKSRCDRAHVGCVIVDRATGRVVSRAFNETPHGLEPCDTGGHRMIDGHCVNTVHAERGAIRKMTSHDSEYTLYVTHYPCQGCAHLIASCPEIVEVVYLGDYRNSNEATALLMGLSKGVHHAEEDCSSSPA

SEQ ID NO: 23 - protein, 136 aa, Unknown
  Description of Unknown: uncultivated organism
  Category: MG66 putative cytidine deaminase
  Description: MG66-26 deaminase
MRELGIKAARDEAKKSRCDRAHVGCVIIDRASGQVVSRAFNETPPTLEPCDTGGHRMVDGHCVNTVHAERGAIRKMAEHGSEYTLYVTHYPCRGCAHLISSCPEIVEVVYLGDYNNSSEATALLMSLSKGVHRVKG

SEQ ID NO: 24 - protein, 135 aa, Unknown
  Description of Unknown: uncultivated organism
  Category: MG66 putative cytidine deaminase
  Description: MG66-27 deaminase
MREYIKAARDEAAKSRCDRAHVGCVIVDHATGQVVSRAFNETPHGLEPCDTGGHRIVDNHCVNTVHAERNAIRKMKEHGSEYTLYVTHYPCRGCAHLISTCPEIVEVVYLGDYNNSSEATALLEGLSKGVHRGEE

SEQ ID NO: 25 - protein, 135 aa, Unknown
  Description of Unknown: uncultivated organism
  Category: MG66 putative cytidine deaminase
  Description: MG66-28 deaminase
MREYIKAARDEAAKSRCDRAHVGCVIVDRATEQVVSRAFNETPNGLEPCDTGGHRIVDDHCVNTVHAERNAIRKMREHGSEYTLYVTHYPCQGCAHLISSCPEIVEVVYLGDYNNSSEATALLSGLSKGVHRGEE

SEQ ID NO: 26 - protein, 36 aa, Unknown
  Description of Unknown: uncultivated organism
  Category: MG66 putative cytidine deaminase
  Description: MG66-29 deaminase
MREYIKAARDEAAKSRCDRAHVGCVIVDRATGQVVS

SEQ ID NO: 27 - protein, 135 aa, Unknown
  Description of Unknown: uncultivated organism
  Category: MG66 putative cytidine deaminase
  Description: MG66-30 deaminase
MREYIKAARDEAAKSRCDRAHVGCVIVDRATGQVVSGAFNETPHGLEPCDTGGHRIVDGHCVNTVHAERNAIRKMKEHGSEYTLYVTHYPCRGCAHLISSCPEIVEVVYLGDYNNSSEATALLSGLSKGVHRGEE

SEQ ID NO: 28 - protein, 135 aa, Unknown
  Description of Unknown: uncultivated organism
  Category: MG66 putative cytidine deaminase
  Description: MG66-31 deaminase
MREYIKAARDEAAKSRCDRAHVGCVIVDRATGQVVSRAFNETPHGLEPCDTGGHRIVDNHCVNTVHAERNAIRKMKEHGSEYTLYVTHYPCQGCAHLISSCPEIVEVVYLGDYRNSSEATALLSGLSKGVHRGEE

SEQ ID NO: 29 - protein, 135 aa, Unknown
  Description of Unknown: uncultivated organism
  Category: MG66 putative cytidine deaminase
  Description: MG66-32 deaminase
MREYIKAARDEAAKSRCDRAHVGCVIVDRATGQVVSRAFNETPHGLEPCDTGGHRIVDNHCVNTVHAERNAIRKMTDHGSEYTLYVTHYPCQGCAHLISSCPEIVEVVYLGDYNNSSEATALLSGLSKGVHRGEE

SEQ ID NO: 30 - protein, 135 aa, Unknown
  Description of Unknown: uncultivated organism
  Category: MG66 putative cytidine deaminase
  Description: MG66-33 deaminase
MREYIKAARDEAAKSRCDRAHVGCVIVDRATGQVVSRAFNETPHGLEPCDTGGHRMVDDHCVNTIHAERNAIRQMKEHGSEYTLYVTHYPCRGCAHFISTCPEIVEVVYLGDYRNSSEATALLSGLSKGVHRGEE

SEQ ID NO: 31 - protein, 40 aa, Unknown
  Description of Unknown: uncultivated organism
  Category: MG66 putative cytidine deaminase
  Description: MG66-34 deaminase
MREYIKAARDEAAKSRCDRAHVGCVIVDRATGQVVSSAFN

SEQ ID NO: 32 - protein, 135 aa, Unknown
  Description of Unknown: uncultivated organism
  Category: MG66 putative cytidine deaminase
  Description: MG66-35 deaminase
MREYIKAARDEAAKSRCDRAHVGCVIVDRATGQVVSSAFNETPHGLEPCDTGGHRIVDNHCVNTVHAERNAIRQMTDHGSEYTLYVTHYPCQGCAHLIASCPEIVEVVYLGDYNNSSEATALLSGLSKGVHRGEE

SEQ ID NO: 33 - protein, 142 aa, Unknown
  Description of Unknown: uncultivated organism
  Category: MG66 putative cytidine deaminase
  Description: MG66-36 deaminase
MREYIKAARDEAAKSRCDRAHVGCVIVDRATGRVVSRAFNETPHGLEPCDTGGHRMIDGHCVNTVHAERNAIRKMPSHDSEYTLYVTHYPCQGCAHLIASCPDIVEVVYLGDYRNSEEATALLMGLSKGIHCAEEDRSSSPA

SEQ ID NO: 34 - protein, 142 aa, Unknown
  Description of Unknown: uncultivated organism
  Category: MG66 putative cytidine deaminase
  Description: MG66-37 deaminase
MREYIKAARDEAAKSRCDRAHVGCVIVDRATGRVVSRAFNETPHGLEPCDTGGHRMIDGHCVNTVHAERNAIRKMPSHDSEYTLYVTHYPCQGCAHLIASCPDIVEVVYLGDYRNSEEATALLMGLSKGVHCAEEDRSSSPA

SEQ ID NO: 35 - protein, 135 aa, Unknown
  Description of Unknown: uncultivated organism
  Category: MG66 putative cytidine deaminase
  Description: MG66-38 deaminase
MREYIKAARDEAKKSRCDRAHVGCVIVDRASGQVVSSAFNETPPGLEPCDTGGHRMVDDHCVNTVHAERGAILKMAEHGSEYTLYVTHYPCRGCAHLISSCPEIVEVVYLGDYNNSSEATTLLMSLSKGVHHVEG

SEQ ID NO: 36 - protein, 135 aa, Unknown
  Description of Unknown: uncultivated organism
  Category: MG66 putative cytidine deaminase
  Description: MG66-39 deaminase
MREYIKAARDEAKKSRCDRAHVGCVIVDRATGQVVSKGFNETPPGLEPCDTGGHHIVDNHCVNTVHAERSAIRKMTEHGSEYTLYVTHYPCRGCAHLITSCPEIMEVVYLGDYNNSSEATELLMGLSKGVHHVEG

SEQ ID NO: 37 - protein, 135 aa, Unknown
  Description of Unknown: uncultivated organism
  Category: MG66 putative cytidine deaminase
  Description: MG66-40 deaminase
MREYIKAARDEAKKSRCDRAHVGCVIVDRATGRVVSRAFNETPHGLEPCDTGGHRIVDDHCVNTVHAERNAIRRMVEHGSEYTLYVTHYPCQGCAHLISSCPEIVEVVYLGDYNNSSEATALLSGLSKGVHRGEE

SEQ ID NO: 38 - protein, 135 aa, Unknown
  Description of Unknown: uncultivated organism
  Category: MG66 putative cytidine deaminase
  Description: MG66-41 deaminase
MREYIQAARDEAKKSRCDRAHVGCVIVDRASGQVVSSAFNETPPGLEPCDTGGHRMVDGHCVNTVHAERGAIRKMAEHGSEYTLYVTHYPCRGCAHLISSCPEIMEVVYLGDYNNSSEATTLLMGLSKGVHHVEE

SEQ ID NO: 39 - protein, 135 aa, Unknown
  Description of Unknown: uncultivated organism
  Category: MG66 putative cytidine deaminase
  Description: MG66-42 deaminase
MREYIQAARDEAKKSRCDRAHVGCVIVDRATGRVVSSAFNETPPGLEPCDTGGHRMVDGHCVNTVHAERGAIRKMAEHGSEYTLYVTHYPCRGCGHLISSCPEIVEVVYLGDYNNSSEATALLMGLSKGVHHVEE

SEQ ID NO: 40 - protein, 135 aa, Unknown
  Description of Unknown: uncultivated organism
  Category: MG66 putative cytidine deaminase
  Description: MG66-43 deaminase
MREYIQAARDEASKSRCDRAHVGCVIVDRATGQVVSRAFNETPHGLEPCDTGGHRIVDNHCVNTIHAERNAIRKMPTHDSEYTLYVTHYPCQGCAHLISSCPEIVEVVYLGDYRNSSEATALLSGLSKGVHRGEE

SEQ ID NO: 41 - protein, 135 aa, Unknown
  Description of Unknown: uncultivated organism
  Category: MG66 putative cytidine deaminase
  Description: MG66-44 deaminase
MREYIRAARDEAAKSRCDRAHVGCVIVDRATGQVVSRAFNETPHGLEPCDTGGHRIVDNHCVNTVHAERNAIRKMTEHGSEYTLYVTHYPCQGCAHLISSCPEIVEVVYLGDYNNSSEATALLEGLSKGVHRGEE

SEQ ID NO: 42 - protein, 135 aa, Unknown
  Description of Unknown: uncultivated organism
  Category: MG66 putative cytidine deaminase
  Description: MG66-45 deaminase
MREYIRAARDEAAKSRCDRAHVGCVIVDRATSRVVSRAFNETPHGLDPCDTGGHRMIDGHCVNTVHAERNAIRKMPSHDSEYTLYVTHYPCQGCAHLIASCPDIVEVVYLGDYRNSKEATALLMGLSKGIHHAEE

SEQ ID NO: 43 - protein, 151 aa, Unknown
  Description of Unknown: uncultivated organism
  Category: MG66 putative cytidine deaminase
  Description: MG66-46 deaminase
MRVRPDWDTYFMRIAKVVAQRSHDEDTQVGCVIVSPDKRILSTGYNGFPPGFPDGKLPRTRPGKYPYIVHSEINAIVSALNRDLRGATLYCRFTPCKDCVKAIITAGITRIVYEETYARDNTDAAVVFEMLEMGGVEIVKHLEHEHEADSD

SEQ ID NO: 44 - protein, 159 aa, Unknown
  Description of Unknown: uncultivated organism
  Category: MG66 putative cytidine deaminase
  Description: MG66-47 deaminase
MSNTQSLHTTFMHILFEFSKLSHCVSKQVAAMAVKDGRIISTGINGTAPGYTNCDDIFNKSDFDRELHHQFSNTYEIHAEMNMILYAAKNGISLDGATLYCSMLPCWNCIKHISVTGIKHIIYAKRYDMLSLEDEKNIYYYCKKLGITIQQFDPDTLGS

SEQ ID NO: 45 - protein, 160 aa, Unknown
  Description of Unknown: uncultivated organism
  Category: MG66 putative cytidine deaminase
  Description: MG66-48 deaminase
MSNTQSLHTTFMHILFEFSKLSHCVSKQVAAMAVKDGRIISTGINGTAPGYTNCDDIFNKSDFDRELHHQFSNTYEIHAEMNMILYAAKNGISLDGATLYCSMLPCWNCIKHISVTGIKHIIYAKRYDMLSLEDEKNIYYYCKKLGITIQQFDPDTLGSF

SEQ ID NO: 46 - protein, 124 aa, Unknown; identical to SEQ ID NO: 5
  Description of Unknown: uncultivated organism
  Category: MG66 putative cytidine deaminase
  Description: MG66-49 deaminase

SEQ ID NO: 47 - protein, 80 aa, Unknown
  Description of Unknown: uncultivated organism
  Category: MG66 putative cytidine deaminase
  Description: MG66-50 deaminase
MVDGHCVNTVHAERGAIRKMTEHGSEYTLYVTHYPCRGCAHLISSCPEIVEVVYLGDYNNSSEATALLMGLSKGVHHVEG

SEQ ID NO: 48 - protein, 150 aa, Unknown
  Description of Unknown: uncultivated organism
  Category: MG67 putative cytidine deaminase
  Description: MG67-2 deaminase
MTACKDKPVCNVAQADATLLSTCLRLLQTAHEIKQNAYAPYSGFQVGAAVLAKNGSIITGVNVENGSLGLTICAERTALSKAVSEGYRPGDFVAIAVAASADGFSPCGACREVINEFGQNMLVVFEYQDEVVVAPLKTLLAYNFVKGKPS

SEQ ID NO: 49 - protein, 62 aa, Unknown
  Description of Unknown: uncultivated organism
  Category: MG67 putative cytdidine deaminase
  Description: MG67-4 deaminase
MAYRPGDFVAIAIAASSPDFSPCGACREVINEFGDDMAVIFEIKGETVVSQLKEHLPYNFKM

SEQ ID NO: 50 - protein, 250 aa, Unknown
  Description of Unknown: uncultivated organism
  Category: MG68 putative adenosine deaminase (TadA-like)
  Description: MG68-1 deaminase
MQHVKHMRTAVRLARYALDHDETPVACIFVHTPTGQVMAYGMNDTNKSLTGVAHAEFMGIDQIKAMLGSRGVVDVFKDITLYVTVEPCIMCASALKQLGIGKVVFGCGNERFGGNGTVLSVNHDTCTLVPKNNSAAGYESIPGILRKEAIMLLRYFYVRQNERAPKPRSKSDRVLDKNTFPPMEWSKYLNEEAFIETFGDDYKTCFANKVDLSSNSVDWDLIDSHQDNIIQELEEQCKMFRFNVHKKSKV

SEQ ID NO: 51 - protein, 239 aa, Unknown
  Description of Unknown: uncultivated organism
  Category: MG68 putative adenosine deaminase (TadA-like)
  Description: MG68-2 deaminase
MLLNKRSYGHFYFIALMTEFSKWDEYYMKLALMEAEKALNSNEVPIGCVFVKSDTEVEIPPLPSRYSKDEFHSSVIASGRNFTNENYNATHHAEIMALTDLISCLECNCKKIDNMGEPCKPTFSKDTECPQCNFNLKNVTLYVTIEPCIMCISALMELQVSRIVFGANNDKFGGCGGTLTNVPEILKDTCSKDFEEIKIERGLYREEAVILLRKFYLIQNPKAPNPKKKAKRTLNLIVD

SEQ ID NO: 52 - protein, 87 aa, Unknown
  Description of Unknown: uncultivated organism
  Category: MG69 UGI
  Description: MG69-1 deaminase
MSKTIKDLEEFAAEKLGYDIVFQESISMEPQEVEHLITTDEKSVLVNSTYDDNKEITISMISTPHPEYRPIALIIQDMEGEVQRKEL

SEQ ID NO: 53 - protein, 88 aa, Unknown
  Description of Unknown: uncultivated organism
  Category: MG69 UGI
  Description: MG69-2 deaminase
MSKTIKDLEEFAAEKLGYDIVFQESISMEPQEVEHLITTDEKSVLVNSTYDDDKEITISVISTPHPEYRPIALVIQDMEGEVQRKELY

SEQ ID NO: 54 - protein, 84 aa, Unknown
  Description of Unknown: uncultivated organism
  Category: MG69 UGI
  Description: MG69-3 deaminase
MTNLSDIIEKETGKQLVIQESILMLPEEVEEVIGNKPESDILVHTAYDESTDENVMLLTSDAPEYKPWALVIQDSNGENKIKML

SEQ ID NO: 55 - protein, 67 aa, Unknown
  Description of Unknown: uncultivated organism
  Category: MG69 UGI
  Description: MG69-4 deaminase
MIVRVTYNVEQEVEISNKFNKDVDIMKPEEYDDYIDDLMFALNEKLPEYAEISCVINDNTGEVLFEG

SEQ ID NO: 56 - protein, 35 aa, Unknown
  Description of Unknown: uncultivated organism
  Category: MG69 UGI
  Description: MG69-5 deaminase
MSKTIKDLEEFAAEKLGYDIVFQESISMEPQEVEH

SEQ ID NO: 57 - protein, 167 aa, Escherichia coli
  Category: reference deaminase
  Description: P68398 TADA tRNA specific adenosine deaminase
MSEVEFSHEYWMRHALTLAKRAWDEREVPVGAVLVHNNRVIGEGWNRPIGRHDPTAHAEIMALRQGGLVMQNYRLIDATLYVTLEPCVMCAGAMIHSRIGRVVFGARDAKTGAAGSLMDVLHHPGMNHRVEITEGILADECAALLSDFFRMRRQEIKAQKKAQSSTD

SEQ ID NO: 58 - protein, 229 aa, Rattus norvegicus [sequence omitted]

SEQ ID NO: 59 - protein, 251 aa, Heterocephalus glaber
  Category: reference deaminase
  Description: Aicda XM 004869540 cytidine deaminase
MAVGSKPKAALVGPHWERERIWCFLCSTGLGTQQTGQTSRWLRPAATQDPVSPPRSLLMKQRKFLYHFKNVRWAKGRHETYLCYVVKRRDSATSFSLDFGYLRNKSGCHVELLFLRYISDWDLDPGRCYRVTWFTSWSPCYDCARHVADFLRGNPNLSLRIFTARLYFCEDRKAEPEGLRRLHRAGVQIAIMTFKDYFYCWNTFVENHERTFKAWEGLHENSVRLSRQLRRILLPLYEVDDLRDAFRTLGL

SEQ ID NO: 60 - protein, 224 aa, Petromyzon marinus
  Category: reference deaminase
  Description: PmCDA1 L1 AVN88313.1 cytidine deaminase
MAGYECVRVSEKLDFDTFEFQFENLHYATERHRTYVIFDVKPQSAGGRSRRLWGYIINNPNVCHAELILMSMIDRHLESNPGVYAMTWYMSWSPCANCSSKLNPWLKNLLEEQGHTLTMHFSRIYDRDREGDHRGLRGLKHVSNSFRMGVVGRAEVKECLAEYVEASRRTLTWLDTTESMAAKMRRKLFCILVRCAGMRESGIPLHLFTLQTPLLSGRVVWWRV

SEQ ID NO: 61 - protein, 208 aa, Petromyzon marinus
  Category: reference deaminase
  Description: PmCDA1 ABO15149.1 cytosine deaminase
MTDAEYVRIHEKLDIYTFKKQFFNNKKSVSHRCYVLFELKRRGERRACFWGYAVNKPQSGTERGIHAEIFSIRKVEEYLRDNPGQFTINWYSSWSPCADCAEKILEWYNQELRGNGHTLKIWACKLYYEKNARNQIGLWNLRDNGVGLNVMVSEHYQCCRKIFIQSSHNQLNENRWLEKTLKRAEKRRSELSIMIQVKILHTTKSPAV

SEQ ID NO: 62 - protein, 199 aa, Homo sapiens
  Category: reference deaminase
  Description: NP 663745.1 DNA dC- dU-editing deaminase APOBEC-3A isoform a
MEASPASGPRHLMDPHIFTSNFNNGIGRHKTYLCYEVERLDNGTSVKMDQHRGFLHNQAKNLLCGFYGRHAELRFLDLVPSLQLDPAQIYRVTWFISWSPCFSWGCAGEVRAFLQENTHVRLRIFAARIYDYDPLYKEALQMLRDAGAQVSIMTYDEFKHCWDTFVDHQGCPFQPWDGLDEHSQALSGRLRAILQNQGN

SEQ ID NO: 63 - protein, 198 aa, Homo sapiens [sequence omitted]

SEQ ID NO: 64 - protein, 197 aa, Lampetra planeri
  Category: reference deaminase
  Description: LpCDA1L1 3 AVN88320.1 cytidine deaminase
MAGDENVRVSEKLHFNTFEFEFENLHYAEGRGQTYVIFDVKPQSEGGRGERLWGYVRNKPLGDHAEVILMSKINDHLETHQDNYTMTWYMSWSPCGKCSSELVPWLQNLLKKQHKLTMHFSRIYDKDRAVDHRGLCDLQHVVSNGFQMGVMGQTEVDTCLAEYVEASGCPPLKWLHMTDSNATQMQDKLSSILMNRF

SEQ ID NO: 65 - protein, 198 aa, Lampetra planeri
  Category: reference deaminase
  Description: LpCDA1L1 1 AVN88319.1 cytidine deaminase
MAGDENVRVSKKLDFNTFEFEFENLHYAEGRGRTYVIFDVKPQSEGGRGERLWGYVRNNPLDDHAEVILMSKINDHLETHQGNYTMTWYMSWSPCGNCSSELVPWLQNLLEEQQHTLTMYFSRIYDKDRAVDHRGLCDLQHVVSNGFQMGVMGQTEVDTCLAEYVEASGCPPLKWLHMTDSNATQTQDKLSSILMNRF

SEQ ID NO: 66 - DNA, 642 bp, Lampetra planeri
  Category: reference deaminase
  Description: ljCDA1 cytidine deaminase
gccaacgccgagtacgtgcgcgtgggcgagaagctggacagctgcaccttccgcacccagttcctgaactaccgccgcagccgcagccgccgctgctgcgtgatcttcgagctgaagcgccagaacagccgcgtgcgcttctggggctacgccatgaacaagccctggagcaacgccgacgtgggcatccacgccgagttcttctgcatcaagaaggtgaagaagtacctgcgcaagaaccccggcatctacaccatcaactggtacagcagctggagcccctgcgccaactgcgccgagaagatcctgaactggtacaacaagaagctgatgggcaagggccacaccctgaagatttgggcctgcaagctgtacttcgagaacatcaagcgcaaccagatcggcctgtggaacctgcgcaacaacggcgtgggcctggccatcatgctgggcgagcactaccagtggtgctggaacaactacatccagaccctgggccgcaacctgaacgagaacaagtggctgaaaaagaccagcaaccgcgcccgcacccgccgcagcgagctgagcatcatgatccacgtgaagcgcctgcacaccgcccgcctgctgctgttcaagcgcctgtgcggctggttcagc

SEQ ID NO: 67 - protein, 84 aa, Unknown; identical to SEQ ID NO: 54
  Description of Unknown: Bacillus phage PBS2 sequence
  Category: reference UGI
  Description: P14739 UNGI BPPB2 (UGI)

SEQ ID NO: 68 - protein, 1245 aa, Artificial Sequence
  Description of Artificial Sequence: Synthetic polypeptide
  Category: adenine base editor
  Description: linker-His tag-adenine deaminse-linker-nickase -linker-SV40 NLS
MGSSHHHHHHSEVEFSHEYWMRHALTLAKRARDEREVPVGAVLVLNNRVIGEGWNRAIGLHDPTAHAEIMALRQGGLVMQNYRLIDATLYSTFEPCVMCAGAMIHSRIGRVVFGVRNAKTGAAGSLMDVLHYPGMNHRVEITEGILADECAALLCYFFRMPRRVFNAQKKAQSSTDSGGSSGGSSGSETPGTSESATPESSGGSSGGSMKKKVFAFALGKASIGYCVRDGFNINEANSIIIDKDHAETMSLRDRRRIKKTLDAHHAREEYFNKVWSGVGLNILDKNNNNFKKEFPSKNEDVIYTSCLLRIALLQNQKLEEWQIYKALYNAFQRRGYDVNIAWKSVQTDDDKENIERMKKYTCENDIELIISDEYKYPCYYDALRLGLWNEDEPTKLNRSIPQHNSNKVRTTEYVAPRELVEKELKQLWLNAQLQLPQLNSISAEEFLYGEYKIPYGSCVQKEFKQYRGTKKDWQGVLCQKIPRFDNRIIAKCKLLPKRNVCKANTIENVSFVLLMKLKNLRFTVISGEKLRLSPVQIKQIYENWLEKVEDTYNKDLEKAEKLGKENPEKRLNITITRQEIEKIIGEKIIDKIEPMKADISGRSSFCRRACQIMNKIILDGELYPQNVDISEFVDRDNAKNGITEEEIQSMLSKIGDWNNLYIPDNREENAQNASNSRIKTDIMLGNITNPIVRNRLQIFRDLLLNLAEKYGTPDEVIFEFVRDGADNSLYGSKKAQDTERFMKQQEKENEQIINELKDAGLYVNGQNHANATYFLMHKLLKSQGGKCIYSGQNISPSNYDECEIDHIYPRTLGGNDALYNKVVCYRRENQDKKGRTPYEWLSPDSDKWANYVNRLNKIKKQLGKKKFELLTSKPEDCEKLIESYNGLAETSHIARVAQQMTAFIFGWGLQIQGESRRIFVNNGSSTCAIRKRYGLNKLLGDNLKKNRSNDKHHALDAICISFSRDFKYDKEIKKDIIKGFNPEIVKNAIDKIMPYPYANDKPFKGNTKPLETIYGLRTYGDKSYITQRVELNSIDKKATKIKSIIDETIKNDLLNKLKENPTEQEWKLMLQNYIHPKKQTKVKKVMISVSEGEITKDSNNRERMGEFVDFGTKGTQHQFKHSKRHKGQILYFNEKGVVEVMPVYSNIKTTDVKDKLQNMGCKLYNKGQMFYSGCLVDIPKPFKAGSKEYPAGRYQIKTIRSDKVAELEDACGNKISTNVKYLVPAEFKKVESKGSGGSPKKKRKV

SEQ ID NO: 69 - protein, 1380 aa, Artificial Sequence
  Description of Artificial Sequence: Synthetic polypeptide
  Category: cytosine base editor
  Description: linker-His tag-cytidine deaminase-linker-nickase -linker-uracil glycosylase inhibitor-linker-SV40 NLS
MGSSHHHHHHMSSETGPVAVDPTLRRRIEPHEFEVFFDPRELRKETCLLYEINWGGRHSIWRHTSQNTNKHVEVNFIEKFTTERYFCPNTRCSITWFLSWSPCGECSRAITEFLSRYPHVTLFIYIARLYHHADPRNRQGLRDLISSGVTIQIMTEQESGYCWRNFVNYSPSNEAHWPRYPHLWVRLYVLELYCIILGLPPCLNILRRKQPQLTFFTIALQSCHYQRLPPHILWATGLKSGSETPGTSESATPESAMKKKVFAFALGKASIGYCVRDGFNINEANSIIIDKDHAETMSLRDRRRIKKTLDAHHAREEYFNKVWSGVGLNILDKNNNNFKKEFPSKNEDVIYTSCLLRIALLQNQKLEEWQIYKALYNAFQRRGYDVNIAWKSVQTDDDKENIERMKKYTCENDIELIISDEYKYPCYYDALRLGLWNEDEPTKLNRSIPQHNSNKVRTTEYVAPRELVEKELKQLWLNAQLQLPQLNSISAEEFLYGEYKIPYGSCVQKEFKQYRGTKKDWQGVLCQKIPRFDNRIIAKCKLLPKRNVCKANTIENVSFVLLMKLKNLRFTVISGEKLRLSPVQIKQIYENWLEKVEDTYNKDLEKAEKLGKENPEKRLNITITRQEIEKIIGEKIIDKIEPMKADISGRSSFCRRACQIMNKIILDGELYPQNVDISEFVDRDNAKNGITEEEIQSMLSKIGDWNNLYIPDNREENAQNASNSRIKTDIMLGNITNPIVRNRLQIFRDLLLNLAEKYGTPDEVIFEFVRDGADNSLYGSKKAQDTERFMKQQEKENEQIINELKDAGLYVNGQNHANATYFLMHKLLKSQGGKCIYSGQNISPSNYDECEIDHIYPRTLGGNDALYNKVVCYRRENQDKKGRTPYEWLSPDSDKWANYVNRLNKIKKQLGKKKFELLTSKPEDCEKLIESYNGLAETSHIARVAQQMTAFIFGWGLQIQGESRRIFVNNGSSTCAIRKRYGLNKLLGDNLKKNRSNDKHHALDAICISFSRDFKYDKEIKKDIIKGFNPEIVKNAIDKIMPYPYANDKPFKGNTKPLETIYGLRTYGDKSYITQRVELNSIDKKATKIKSIIDETIKNDLLNKLKENPTEQEWKLMLQNYIHPKKQTKVKKVMISVSEGEITKDSNNRERMGEFVDFGTKGTQHQFKHSKRHKGQILYFNEKGVVEVMPVYSNIKTTDVKDKLQNMGCKLYNKGQMFYSGCLVDIPKPFKAGSKEYPAGRYQIKTIRSDKVAELEDACGNKISTNVKYLVPAEFKKVESKGSGGSTNLSDIIEKETGKQLVIQESILMLPEEVEEVIGNKPESDILVHTAYDESTDENVMLLTSDAPEYKPWALVIQDSNGENKIKMLSGGSPKKKRKV

SEQ ID NO: 70 - protein, 1025 aa, Artificial Sequence
  Description of Artificial Sequence: Synthetic polypeptide
  Category: nickase
  Description: nMG1-4 (D9A) nickase
MKKKVFAFALGKASIGYCVRDGFNINEANSIIIDKDHAETMSLRDRRRIKKTLDAHHAREEYFNKVWSGVGLNILDKNNNNFKKEFPSKNEDVIYTSCLLRIALLQNQKLEEWQIYKALYNAFQRRGYDVNIAWKSVQTDDDKENIERMKKYTCENDIELIISDEYKYPCYYDALRLGLWNEDEPTKLNRSIPQHNSNKVRTTEYVAPRELVEKELKQLWLNAQLQLPQLNSISAEEFLYGEYKIPYGSCVQKEFKQYRGTKKDWQGVLCQKIPRFDNRIIAKCKLLPKRNVCKANTIENVSFVLLMKLKNLRFTVISGEKLRLSPVQIKQIYENWLEKVEDTYNKDLEKAEKLGKENPEKRLNITITRQEIEKIIGEKIIDKIEPMKADISGRSSFCRRACQIMNKIILDGELYPQNVDISEFVDRDNAKNGITEEEIQSMLSKIGDWNNLYIPDNREENAQNASNSRIKTDIMLGNITNPIVRNRLQIFRDLLLNLAEKYGTPDEVIFEFVRDGADNSLYGSKKAQDTERFMKQQEKENEQIINELKDAGLYVNGQNHANATYFLMHKLLKSQGGKCIYSGQNISPSNYDECEIDHIYPRTLGGNDALYNKVVCYRRENQDKKGRTPYEWLSPDSDKWANYVNRLNKIKKQLGKKKFELLTSKPEDCEKLIESYNGLAETSHIARVAQQMTAFIFGWGLQIQGESRRIFVNNGSSTCAIRKRYGLNKLLGDNLKKNRSNDKHHALDAICISFSRDFKYDKEIKKDIIKGFNPEIVKNAIDKIMPYPYANDKPFKGNTKPLETIYGLRTYGDKSYITQRVELNSIDKKATKIKSIIDETIKNDLLNKLKENPTEQEWKLMLQNYIHPKKQTKVKKVMISVSEGEITKDSNNRERMGEFVDFGTKGTQHQFKHSKRHKGQILYFNEKGVVEVMPVYSNIKTTDVKDKLQNMGCKLYNKGQMFYSGCLVDIPKPFKAGSKEYPAGRYQIKTIRSDKVAELEDACGNKISTNVKYLVPAEFKKVESK

SEQ ID NO: 71 - protein, 1059 aa, Artificial Sequence
  Description of Artificial Sequence: Synthetic polypeptide
  Category: nickase
  Description: nMG1-6 (D13A) nickase
MEKEKNNHVWGFAIGKGSLGEAVRVGGDFKHIASVLLDPEFGEIKTAALARRQMRTRKAHKAREKWLEECLDGTGVEILKRREVGIVDGQWRLISKGDERLEREFPPNGEEVCYNSIALRCKLLLGEKLEGWQVFKALNSAIQKRGYDENIPWGEAEEKSSKKDEDDYAQKLSQYEREKSELFESFADGEKYDFPCFFKAYKMGLWSPENPRRVEVRIDCRAQKAKSYVVARKYVEREFECLVEAAAKFFPKLKGRAKFILYGVSETPYASYYGNMRKKFGLKRGAESDWTALGQKVPRFDNRIIDKCRLIPRMNVCKIRPLNEARNEKDLLYYEVTLALKLLNLRFFRNSNIEQLTFEEFKKAFEIASGAKYKMTKTAMKKFLKSISATALGDDYAEIEPPKESGRASFSRPAMDILKELIFSGMPPREFYGRKIPEISNTDKNKGVVASDLDFIKLMGDCPWGGIFIPDVQTYQFANAAFPNPDAQINKLIGSQNNPIVRHRLTFFFERIKFLESKYGVPDKVVLEFVRDDFMGEKEKKEMRIAMKKRAEEKMMIAKDLDEHGFKGGNLLLKMELYRKQNGICLYTGDALPLSELATLEIEHIVPRSRGGPDAQYNYVITREKTNKLKGDKTPYEWLSSDAKEWASYTDRVNACAKALGKKRCRLLLEKDAEELVEKYTALAETAHIAKLAQKIVCMHFGFQFGGLSGTKRVFTVPGALTSRIRKFYGLDRILHNAAAESENLSFEEFLKFSEDLEKKNRKNKKHHALDAMCLCFAPTGVDSRRAKLGEILPEKLRSEKAAREFFKSYLDKIMPVDVAPKKPRLEDGIYSKRIIGGKACMVKRNNLVDLAYKSGLKPVFDIPTLIKLVDKKEKGIINPQIRKMIGEFAATNPDESAWRKWCEEVRLPSKSGLGARVLRVLVYYGEADEYKDLSKDGCGAYRKGDGHKGQVVWESVDGKYYVEPVYVHASKAGVMAALNANPKKKRICGMFNSHCTVDVGDVYNDRGDFILPAGRYMVNTILTTGRCVLTNADGEKRNPININYLMRAGMRRVELSEL

SEQ ID NO: 72 - protein, 1134 aa, Artificial Sequence
  Description of Artificial Sequence: Synthetic polypeptide
  Category: nickase
  Description: nMG3-6 (D13A) nickase
MSTDMKNYRIGVAVGDRSVGLAAIEFDDDGLPIQKLALVTFRHDGGLDPTKNKTPMSRKETRGIARRTMRMNRERKRRLRNLDNVLENLGYSVPEGPEPETYEAWTSRALLASIKLASADELNEHLVRAVRHMARHRGWANPWWSLDQLEKASQEPSETFEIILARARELFGEKVPANPTLGMLGALAANNEVLLRPRDEKKRKTGYVRGTPLMFAQVRQGDQLAELRRICEVQGIEDQYEALRLGVFDHKHPYVPKERVGKDPLNPSTNRTIRASLEFQEFRILDSVANLRVRIGSRAKRELTEAEYDAAVEFLMDYADKEQPSWADVAEKIGVPGNRLVAPVLEDVQQKTAPYDRSSAAFEKAMGKKTEARQWWESTDDDQLRSLLIAFLVDATNDTEEAAAEAGLSELYKSWPAEEREALSNIDFEKGRVAYSQETLSKLSEYMHEYRVGLHEARKAVFGVDDTWRPPLDKLEEPTGQPAVDRVLTILRRFVLDCERQWGRPRAITVEHTRTGLMGPTQRQKILNEQKKNRADNERIRDELRESGVDNPSRAEVRRHLIVQEQECQCLYCGTMITTTTSELDHIVPRAGGGSSRRENLAAVCRACNAKKKRELFYAWAGPVKSQETIERVRQLKAFKDSKKAKMFKNQIRRLNQTEADEPIDERSLASTSYAAVAVRERLEQHFNEGLALDDKSRVVLDVYAGAVTRESRRAGGIDERILLRGERDKNRFDVRHHAVDAAVMTLLNRSVALTLEQRSQLRRTFYEQGLDKLDRNQLKPEEDWRDFTGLAPASQEKFLEWRKAATILGDLLAEAIEDDSIAVVSPLRLRPQNGSVHLETISAVKKQTLGSDWPADAVKRIVDPEIYLAMKDALGKLKELPEDSARSLELPDGRFVEADDEVLFFPENAASILTPRGVAEIGGSIHHARLYGWLTKKGELKVGMLRVYGAEFPWLMRESGSRNVLSMPIHRGSQSFRDMQDTTRKAVESGEAVEFAWITQNDELEFDPDDYIAHGGKDELRQFLGFMPECRWRVDGFKKNYQIRIRPAMLSREQLPSDIQRRLESKTLTKNESLLLKALDTGLVVAIGGLLPLETLKVIRRNNLGFPRWRGNGNLPTSFEVRSSALRALGVEG

SEQ ID NO: 73 - protein, 1131 aa, Artificial Sequence
  Description of Artificial Sequence: Synthetic polypeptide
  Category: nickase
  Description: nMG3-7 (D12A) nickase
MSEHTKYRIGIAVGDRSVGLAAIEFDDDGFPLSNLAMVTYRHDGGLDPTTNKSPKSRKETRGVALRTMRMRRRKKSRLKDLDKTLRALGYVVPACEEPQTYEAWKSRALLATTKVEGAQELGEHLVRAVRHMARHRGWRNPWWTFNQLEIASTAPSDTFAKIRERAEKEWPGVVPEEATLGMIGALAASNNVLLRPRTYRKDQPRHSKKLNVLGQEPILVDKVRQEDLLAELRTICKKQDIEDQYEKLAQAVFEQTRPYVPLDRVGKDPLQPNKSRASRASLEFQRFRILDAVAHLRVRVGASDRRALTDEEHDKAVHFLMGYSKKDVPTWGDVADEIGVEPAHLIAPVIDDVRLNKAPYDRSSTEFEQKMKKKTRARQWWDEANLESRSQLILLVSDPTDETMRLAEVSGLYEVFESWPDEEKEALEGLKVESGRAAYSTDTLNKLSDHMRLKRIDLHEARKIAFGVDDMWHPPLDRIDEPTGQPTVDRVLTIVRRFIFDCERAWGCPENVVIEHARTGLMGPAQRADVLNEIAKNRKKNDKIREDLRAGGINNPTRADIRRNAIVQDQESQCLYCGATIGVSYSELDHIVPRAGGGSSRRENLAAVCRACNDSKKDTPFAVWAKNTSRPVTLEGTIQRLRELKAFKRPKDRRMVDLIIRRLKQTEKDDPIDERSLASTSYAATAIRERIEQYFNEKAEKLDLAKVHIDVYSGSLTRESRRAGGIDKMVLLRGQSDKNRFDVRHHAIDAAVLTLLNRSVAVTLEQRRLIKQQREYSLEKSRRERDNVWRDFMGLGPAAQEKFAKWKKTAYVLADIIKEAISNDAIPVVSPLRLRPQNGSVHLDTVDAVLERTIGDAWTVDQVHRIVNPQIYLAFAGYLGNQKALDPDSSRVLALNDGRKLTAEDVIYVFPEKAASILTPRGVVKIGESVHHVRLYAWKNRKGKAEVGMLRVFGAEFPWLMRESGVKDVLRVPIHTGSQSYRDLSFTVRKNIEKGEAAEIGWLTQNEELEFNPESYLQEGGKDKLAKFLAFLPETRWRVDGFPMPDKLRIRPALLSREEIPEGVFRTEEQSLLEEALTKGLIIATKGLLSLPDVKVLRRNNLGIPRWRGGSYRPVSLDIQRAALAALDEQE

SEQ ID NO: 74 - protein, 1132 aa, Artificial Sequence
  Description of Artificial Sequence: Synthetic polypeptide
  Category: nickase
  Description: nMG3-8 (D13A) nickase
MSTDMKNYRIGVAVGDRSVGLAAIEFDDAGFPIQKLALVTFRHDGGLDPTDNPKSRKETRGEARRRMRMTRRRKQRLRDLDKVLENLGYTVPEGPEPETYEAWTSRALLASIKLASADELNEHLVRAVRHIARHRGWVNPWWSLDQLERASQEPSETFEIILARARELFGERVPANPTLGMLGALAANNEVLLRPRAEKKKKTGYVRGTPLLAAQVRQIDQVAELRRICEVQGIEEQYETLRNAIFAHKVAYVPTERVGKDPLAPSKNRTIRASLEFQEFRILDSVANLRVRTDSRAKRELTEGEYDAAVEFLMGYTAKEQPSWADVAEEIGVPGNRLIAPVLEDVQQKTAPFDRSSAAFEKAMSKRTEARQWWEANDDDQLRSLFIMFLADATNDTEEAAAVAGLPELYMSWPAEEREALSNIDFEKGRVAYSHETLSKLSEYMHEHRVGLHEARKAVFGVDDTWRPPLAKLEEPTGQPTVDRVLTILRRFVLDCERQWGRPRAITVEHARIGLVGPAQRQNILKEQEDNRKNNECIRDELRKSGVENPSRTEVRRHLVVQDQESQCLYCGAVIRTDTSELDHIVPRAGGGSSRRENLAAVCRYCNSKKDRTLFYDWAGSVRLQETIDRVRQLKAFKDSKKAKMFKNQIRRLRQTEADEPIDERSLASTSYAAVAVRERLEQHFNEGLAPDDKNRVVLDVYAGSVTRESRRAGGIDERILLRGERDKNRFDVRHHAIDAAVMTLLNRSVALTLEQRSQLRRAFYEQGLDKLDRDQLKPEEDWRNFIGLSLASQEKFLEWKKVTTVLGDLLAEAIEDDSIAVVSPLRLRPQNGRVHKDTIAAVKKQTLGSAWSADAVKRIVDPEIYLAMKDALGKSKVLPEDSARTLELSDGRYLEADDEVLFFPKNAASILTPRGVAEIGGSIHHARLYSWLTKKGELKIGMLRVYGAEFPWLMRESGSHDVLRMPIHPGSQSFRDMQDTTRKAVESSEAVEFAWITQNDELEFEPEDYIAHGGKDELRQFLEFMPECRWRVDGFKKNYQIRIRPAMLSREQLPSDIQRRLESKTLTENESLLLKALDTGLVVAIGGLLPLGTLKVIRRNNLGFPRWRGNGNLPTSFEVRSSALRALGVEG

SEQ ID NO: 75 - protein, 1055 aa, Artificial Sequence
  Description of Artificial Sequence: Synthetic polypeptide
  Category: nickase
  Description: nMG4-5 (D17A) nickase
MGDQQTLQATSYCLGLAVGVQGVGWAVIDLDDQGQPLGVRRTGVRCFDSGVGSETEFEKGVDEPPSTKRRQARQQRRQLWRRAQRQRRVFRALQEAGLLPPGPPTPVSRDKILRTLDADLAIQFGSLEDRIAAHLLPYRLRALALDTPLPPYALGRAFYHLAQRRGFLSNKKALKEEKEAGEVKKGIAELQEEMNRAGARALGEYFSSLDPEQRRIRNRWTARQMYLDEFDRVWEAQSRYHPRLTDELKTKVRRAIFFQRPLKSQKGLIGRCELEPRHRRAPLASLLAQRFRYWQKINDLEVIQPDGVVRPLSPEERHKLAHFLETQAEATFARIRKLLDLKKPKGSQEDFAFNLERGGEKRILGNRTAAKMAAVLGQRWAAMDDEDKRRLVNEILSFEKEAPLARRLVRAWNLDEPTAAQLAALDFEPGYAALSARAIRKLLPLMQREGMRFATARKQVYGDHLLGTRAYDALPPVAKAIPSLRNPAVCRALTEVRKVVNALVRAYGKPAMVRIELARDMKRGRKQRKETWQAMRENERCRLDARKLLQDHGIQEPRPADILKVLLAEECNWECPYTGKAISMDALIGSQPQFDVEHIIPFSRSLDNSFLNKTLCYHEENRNVKQNRTPFEAYGGDEQRWHEILQRVRRFRGSAAESKLRKFQLRQLPADFTNRHLNDTRYASRLAADYLALLYGGRVDANGRQRVQVGTGATTGFLRDEWGLNAILGDNDEKERADHRHHAIDAVVIALTGPGTVQALTRAALRAKELGRRLFVPLDPPWADRDSFLRDVRASVEAITVSYRVDRKVSGQLHEESNYSKPHMTVDNKGNLVEHRHIRKPLKDMSVEEVEAIVDDRVRKLVQEKLRQLGQEPKKAFADEANHPYFTTADGRLVPIHKARIRKTVATITVGPPQCPRHVAPGLNHHIEILAVRDPAGAVTHWEGELVSLFEAARRVKAGEPVVRRNHGPNKDFLFSLAKGEYVEMELQPGKRQLFRVTVISAKQIEFRLHHDARPTMLLRKTPGARVIRSPGSLFKAKARKVAVDPLGNVFPAND

SEQ ID NO: 76 - protein, 1003 aa, Artificial Sequence
  Description of Artificial Sequence: Synthetic polypeptide
  Category: nickase
  Description: nMG14-1 (D23A) nickase
MEITINREIGKLGLPRHLVLGMAPGIASCGFALIDTANHEILDLGVRLFDSPTHPKTGQSLAVIRRGFRSTRRNIDRTQARLKHCLQVLKAYGLIPQDATKEYFHTTKGDKQPLKLRVDGLDRLLNDREWALVLYSLCKRRGYIPHGEGNQDKSSEGGKVLSALAANKEAIAETSCRTVGEWLAQQPQSRNRGGNYDKYVTHAQLIEETHILFDAQRSFGSKYASPEFEAAYIEVCDWERSRKDFDRRTYDLVGHCSYFPTEKRAARCTLTSELVSAYGALGNITIIHENGTSRALSATERDECIAILFSCEPIRGNKDCAVKFGALRKALDLSSGDYFKGVPAADEKTREVYKPKGWRVLRNTLNAANPILLQRLRDDRDLADAVMEAVAYSSALPVLQEQLQGLPLSEAEIEALCRLPYSSKALNGYGNRSKKALDMLLDCLEEPEVLNLTQAENDCGLLGLRIAGAQLERSDRLMPYETWIERTGRTNNNPVVIRSMSQMRKVVNAICRKWGVPNEIHVELDRELRLPQRAKDEIAKANKKNEKNRERIAGQIAELRGCTADEVTGKQIEKYRLWEEQEYFDLYTGAKIEVDRLISDDTYTQIDHILPFSRTGENSRNNKVLVLAKSNQDKREQTPYEWMSHDGAPSWDAFERRVQENQKLSRRKKNFLLEKDLDTKEGEFLARSFTDTAYMSREVCAYLADCLLFPDDGAKAHVVPTTGRATAWLRRRWGLNFGSNGEKDRSDDRHHATDACVIAACSPSLVIKTARINQETHWSITRGMNETQRRDAIMKALESVMPWETFANEVRAAHDFVVPTRFVPRKGKGELFEQTVYRYAGVNAQGKDIARKASSDKDIVMGNAVVSADEKSVIKVSEMLCLRLWHDPEAKKGQGAWYADPVYKADIPALKDGTYVPRIAKAHTGRKAWKPVPESAMAKPPLEIYFGDLVQIGDFIGRFSGYNINNANWSFTDRLTRLNLSCPTVGQLNNDLSPVVIRESPIK

SEQ ID NO: 77 - protein, 1082 aa, Artificial Sequence
  Description of Artificial Sequence: Synthetic polypeptide
  Category: nickase
  Description: nMG15-1 (D8A) nickase
MNYVLGLAVGIASVGWAVLELNEEDNPIRIEGLGARIFDKAEVPKTGASLAAPRRMSRGIRRVIRRRRFRLQRVRSYLKKHNILPAEKVDHLYDVPSAIDIYELRKRALTEKVTAEEWARLLIFFAKHRGFKSNRKKASGDADEGEMLKAIAANAEILKNYRTVGEMLCDNEKFRKRKRNRDGAYNFTVSRAMLMEEIHTLFEIQRNLGQKFADEKLEEEYVILFAAQRKFDEGPGENSPYAGNQIEKMIGSCTLEGKKEKRAPKASYAFMAFNLWQKINHLKVNRRGSERFLTEEERRRIADLAWKKEKLTYGSLRKVLSLDPEDRFVGLRYDLKKGKAENLEEPVSEAEKRSFSWVKDYHSIRKALDKVEKNRILKLSHEQLDTIATAFSVYKNEETIEKYLEEGGIGKADGEALLERLSGFSKFGHLSLKACYKLLPFLEKGEVYSRACELAGYDFSKSSLENIDDIPNPVVKRSISQTLKVINAIILRYGNPVEVHIELARELARSFRDRKKMEKGMQENQAKNEKIRQRLISEFGVLRPKGMDIVKFKLCEEQNGECAYSQKHFDMEKLLKDPSYAEVDHIIPYSRSFDDSYNNKVLVLTKENREKRNRIPMEYLADAPERKNRFIHWVKSTIRNSRKRENLLRTDYTATTENEWKRRNLQDTQYISKYLYNYLRHHLVLAKGYTERKRRIIPVNGAVTAYFRKRLGINKIRENGDLHHAVDAVIIACATQGIVNKVSRYSKSRELWDYEVDMETGEVLQKKNKNTKDVFPEPWLNFRYELEQKVRVRPLDIPETADITEMEEPFVSHMPNRKIHGPAHKETIRSGRLKEEGYTISKTALIDLKLTEDKEEIKGYYNKESDRLLYEALKKQLQRYGGKAKEAFKEPFHKPKADGTPGPIVNKVKIMEKSTMLIPVNGGKGLASNGNMVRIDVFRAEEKGKKKYYFIPVYVADTVKEELPNRAVLAHKPYEAWKIMKEENFIFSLYPNDLIFVDAGKEIPFKAALKGSTLDPEKKASRFLMYYKGADIATGSISGVNHDETYKARGVGIQSLREIKKCCIDVLGNISFASKEKRQTFR

SEQ ID NO: 78 - protein, 1348 aa, Artificial Sequence
  Description of Artificial Sequence: Synthetic polypeptide
  Category: nickase
  Description: nMG18-1 (D12A) nickase
MDQSKEYYIGLAGGTDSVGWAVLNPDYTVVKKRGKSLWGVRLFESGQTAAERRLARSARRRTDRKKWRLKLLKELFAEEVAACDPAFFARLAESRYWEDDKKVDGADTLFHDADFTDKDYHRQFPTIYHLRRHLMCCTEKPDIRLLYLAVAHMIKNRGHFLNEGQDLNQVRRFDDVWQNLCAAVSDVLGIELAVENGAKAAEVLTSSVKIKEKTKQLESVLGEGESEADRSVCKALAGLLAGAKVSAVDLFNGDEALKECGKFSLAEKSIEELEPDLGDALGEERFSLLQYAYAAYNWAVFARLLPEGKTISEVKTEEYEAYKADLRALKQLVKQYASDQYYRVFRSAKIKGNYASYVGKTNCGNEKSNPESCKPEEFFAFLKKELKPLWSQNIPAAASLAAKLESGTLLRRQRSGENAAIPYQAHLQELQIILKNMQQFYPFLQKADENGFTPAYKIEKLLTFRIPYYVGPLNDAHKEKGFCWIVKKADVPVLPWNFDQVVDENACEDAFIGRMSATCTYLVGENVLPQNSPLYCRFMVLNELNNLRIRSEKITPALKQAIFTQLFCAGKGGKVTQKKLLDFLHSQGIDANKQDISGIDGDFKASMAPAVKLQSIFTEPLPPEILERLAFALTVSGESHKMLQNRIRAILPNADNAVIRKVCALKFTGWGRLSQKLLTEIYDVDQTTGECRSLMDLLWSTNNNLMQLLSGDFTFAAGIDAYNAAQNGTENIFDYDHLVKDLYVSPSVKRGLWQTLLLVKEVRKIMGCDPARVFIEMARGVSPEQKNKRTVSRKDQLLALYKACKEDARDWCGELEALPEDKLRSDKLYLYYTQMGRCMYSGEPIRLDDLMHDTANQLYDIDHIYPQSKTKDDSLTNRVLVKRQLNAIKSNDYPLPQTMRQTALWKALLEKGLISKQKYLRLTRTTPFTEEELAGFINRQLVETRQSTKAAAHLLEQLLPNTEVVYVKAGLAADFRQEFGFVKCRDANDFHHAKDAYLNAVVGNVYHEKFTKNPLRFVRSGQEYSLNLSALFQNWNIYKGGRVIWQKGEDGSLETVRARMAKNDPMVTRYCTEGRGALYDLQPMKKSKGQLPLKSSDERLQHIDRYGGYNKLAGAYFTLAAYYKKGKRVKSIESVPLYLAAKLQRDPAALQQYLADQLGTDRVEILVPEIKLGTLFKWNGYPMTLSGRTGPQLLFRNAAELRTNAEQEQYIKKMSRYLEKCKGRKEPLPIRPAYDKLTPEENLQLYDAFTQWLTSGIYAKRLSLQGKFLLEKRDAFAALSPEAQVRQLMEILHLFQCNPVAANLSELGGAAHAGILLASKNIDGKVPVSIVHQSVTGYFTQEVCLNDL

SEQ ID NO: 79 - DNA, 37 bp, Artificial Sequence
  Description of Artificial Sequence: Synthetic oligonucleotide
  Category: target sequence
  Description: nMG1-4 (D9A) protospacer and PAM for in vitro nickase assay
ccgtgagccaccacgtcgcaagcctcgaccaggaagg

SEQ ID NO: 80 - DNA, 38 bp, Artificial Sequence
  Description of Artificial Sequence: Synthetic oligonucleotide
  Category: target sequence
  Description: nMG1-6 (D13A) protospacer and PAM for in vitro nickase assay
tccgtgagccaccacgtcgcaagcctcgactagaacgg

SEQ ID NO: 81 - DNA, 32 bp, Artificial Sequence
  Description of Artificial Sequence: Synthetic oligonucleotide
  Category: target sequence
  Description: nMG3-6 (D13A) protospacer and PAM for in vitro nickase assay
agccaccacgtcgcaagcctcgacgtgggtta

SEQ ID NO: 82 - DNA, 31 bp, Artificial Sequence
  Description of Artificial Sequence: Synthetic oligonucleotide
  Category: target sequence
  Description: nMG3-7 (D12A) protospacer and PAM for in vitro nickase assay
agccaccacgtcgcaagcctcgacgtgttac

SEQ ID NO: 83 - DNA, 32 bp, Artificial Sequence; identical to SEQ ID NO: 81
  Description of Artificial Sequence: Synthetic oligonucleotide
  Category: target sequence
  Description: nMG3-8 (D13A) protospacer and PAM for in vitro nickase assay

SEQ ID NO: 84 - DNA, 29 bp, Artificial Sequence
  Description of Artificial Sequence: Synthetic oligonucleotide
  Category: target sequence
  Description: nMG4-5 (D17A) protospacer and PAM for in vitro nickase assay
agccaccacgtcgcaagcctcgacggcca

SEQ ID NO: 85 - DNA, 40 bp, Artificial Sequence
  Description of Artificial Sequence: Synthetic oligonucleotide
  Category: target sequence
  Description: nMG14-1 (D23A) protospacer and PAM for in vitro nickase assay
tccgtgagccaccacgtcgcaagcctcgacggcggggacg

SEQ ID NO: 86 - DNA, 37 bp, Artificial Sequence
  Description of Artificial Sequence: Synthetic oligonucleotide
  Category: target sequence
  Description: nMG15-1 (D8A) protospacer and PAM for in vitro nickase assay
ccgtgagccaccacgtcgcaagcctcgactggacctg

SEQ ID NO: 87 - DNA, 32 bp, Artificial Sequence
  Description of Artificial Sequence: Synthetic oligonucleotide
  Category: target sequence
  Description: nMG18-1 (D12A) protospacer and PAM for in vitro nickase assay
agccaccacgtcgcaagcctcgaccgtaattg

SEQ ID NO: 88 - DNA, 121 bp, Artificial Sequence
  Description of Artificial Sequence: Synthetic polynucleotide
  Category: single guide RNA
  Description: nMG1-4 (D9A) single guide RNA for in vitro nickase assay
ccaccacgtcgcaagcctcgacgttttgatttactcgaaagagtccaatcataattgaccggagaataattgattcctctacaatgtacgaataaattcattctctaaaccttaaaaattt

SEQ ID NO: 89 - DNA, 99 bp, Artificial Sequence
  Description of Artificial Sequence: Synthetic oligonucleotide
  Category: single guide RNA
  Description: nMG1-6 (D13A) single guide RNA for in vitro nickase assay
ccaccacgtcgcaagcctcgacgttttgacttgaaaaagtcttaactgattttgccgaatttcaagctctgcattgcaccttggcattcggcatatttt

SEQ ID NO: 90 - DNA, 110 bp, Artificial Sequence
  Description of Artificial Sequence: Synthetic polynucleotide
  Category: single guide RNA
  Description: nMG3-6 (D13A) single guide RNA for in vitro nickase assay
ccaccacgtcgcaagcctcgacgttgagaatcgaaagattcttaataaggcatccttccgatgctgacttctcaccgtccgttttccaataggagcgggcggtatgtttt

SEQ ID NO: 91 - DNA, 113 bp, Artificial Sequence
  Description of Artificial Sequence: Synthetic polynucleotide
  Category: single guide RNA
  Description: nMG3-7 (D12A) single guide RNA for in vitro nickase assay
ccaccacgtcgcaagcctcgacgttgggaaccgaaaggttcccaataaggcgcatcttggcgctgacttctcaccgtcctcttgctgcttagcagagggcggtatgttttttt

SEQ ID NO: 92 - DNA, 118 bp, Artificial Sequence
  Description of Artificial Sequence: Synthetic polynucleotide
  Category: single guide RNA
  Description: nMG3-8 (D13A) single guide RNA for in vitro nickase assay
ccaccacgtcgcaagcctcgacgttgagaatctttcgaaagaaagattcttaataaggcatccttccgatgctgacttctcaccgtccggctcctcttaggaacgggcggtatgtttt

SEQ ID NO: 93 - DNA, 124 bp, Artificial Sequence
  Description of Artificial Sequence: Synthetic polynucleotide
  Category: single guide RNA
  Description: nMG4-5 (D17A) single guide RNA for in vitro nickase assay
ccaccacgtcgcaagcctcgacgctgtggcttgcgggggaaaccccttgtcacagtaagggactttcgttcgcgaaaggcaacctcgccagcatcgctgggcgaggaccagggcaaggcgattt

SEQ ID NO: 94 - DNA, 118 bp, Artificial Sequence
  Description of Artificial Sequence: Synthetic polynucleotide
  Category: single guide RNA
  Description: nMG14-1 (D23A) single guide RNA for in vitro nickase assay
ccaccacgtcgcaagcctcgacgtcttgagcgaaagctccagacaaggggagccacttaagtggcttacccgtaaagtaacccccgttcaatcttcggattgggcggggcgaactttt

SEQ ID NO: 95 - DNA, 118 bp, Artificial Sequence
  Description of Artificial Sequence: Synthetic polynucleotide
  Category: single guide RNA
  Description: nMG15-1 (D8A) single guide RNA for in vitro nickase assay
ccaccacgtcgcaagcctcgacgttgtaattccctagaaataggttattacaataaggtccaacaggagtgttggtaccgtaaagctctaacggcacccacgggtgccgttatctttt

SEQ ID NO: 96 - DNA, 101 bp, Artificial Sequence
  Description of Artificial Sequence: Synthetic polynucleotide
  Category: single guide RNA
  Description: nMG18-1 (D12A) single guide RNA for in vitro nickase assay
ccaccacgtcgcaagcctcgacgtttgagagtagtgaaaactacgagttcaaatacaattttttcaaattgccctatagggccctcacagtgtgagatttt

SEQ ID NO: 97 - DNA, 22 bp, Artificial Sequence
  Description of Artificial Sequence: Synthetic oligonucleotide
  Category: spacer
  Description: MGA1-4 sgRNA spacer 1 (targeting E. coli lacZ)
cgtttgccgtctgaatttgacc

SEQ ID NO: 98 - DNA, 22 bp, Artificial Sequence
  Description of Artificial Sequence: Synthetic oligonucleotide
  Category: spacer
  Description: MGA1-4 sgRNA spacer 2 (targeting E. coli lacZ)
gaagatcaggatatgtggcgga

SEQ ID NO: 99 - DNA, 22 bp, Artificial Sequence
  Description of Artificial Sequence: Synthetic oligonucleotide
  Category: spacer
  Description: MGA1-4 sgRNA spacer 3 (targeting E. coli lacZ)
acgggtaacagtttctttatgg

SEQ ID NO: 100 - DNA, 22 bp, Artificial Sequence
  Description of Artificial Sequence: Synthetic oligonucleotide
  Category: spacer
  Description: MGA1-6 sgRNA spacer 1 (targeting E. coli lacZ)
cgttgctgcataaaccgactac

SEQ ID NO: 101 - DNA, 22 bp, Artificial Sequence
  Description of Artificial Sequence: Synthetic oligonucleotide
  Category: spacer
  Description: MGA1-6 sgRNA spacer 2 (targeting E. coli lacZ)
aaaacccgaaactgtggagcgc

SEQ ID NO: 102 - DNA, 22 bp, Artificial Sequence
  Description of Artificial Sequence: Synthetic oligonucleotide
  Category: spacer
  Description: MGA1-6 sgRNA spacer 3 (targeting E. coli lacZ)
gattgaaaatggtctgctgctg

SEQ ID NO: 103 - DNA, 22 bp, Artificial Sequence
  Description of Artificial Sequence: Synthetic oligonucleotide
  Category: spacer
  Description: MGA3-6 sgRNA spacer 1 (targeting E. coli lacZ)
tacgggtaacagtttctttatg

SEQ ID NO: 104 - DNA, 22 bp, Artificial Sequence
  Description of Artificial Sequence: Synthetic oligonucleotide
  Category: spacer
  Description: MGA3-6 sgRNA spacer 2 (targeting E. coli lacZ)
gcgttggcaatttaaccgccag

SEQ ID NO: 105 - DNA, 22 bp, Artificial Sequence
  Description of Artificial Sequence: Synthetic oligonucleotide
  Category: spacer
  Description: MGA3-6 sgRNA spacer 3 (targeting E. coli lacZ)
ctgaatatcgacggtttccata

SEQ ID NO: 106 - DNA, 22 bp, Artificial Sequence
  Description of Artificial Sequence: Synthetic oligonucleotide
  Category: spacer
  Description: MGA3-7 sgRNA spacer 1 (targeting E. coli lacZ)
cacatttaatgttgatgaaagc

SEQ ID NO: 107 - DNA, 22 bp, Artificial Sequence
  Description of Artificial Sequence: Synthetic oligonucleotide
  Category: spacer
  Description: MGA3-7 sgRNA spacer 2 (targeting E. coli lacZ)
acacaaatcagcgatttccatg

SEQ ID NO: 108 - DNA, 22 bp, Artificial Sequence
  Description of Artificial Sequence: Synthetic oligonucleotide
  Category: spacer
  Description: MGA3-7 sgRNA spacer 3 (targeting E. coli lacZ)
atggatgagcagacgatggtgc

SEQ ID NO: 109 - DNA, 22 bp, Artificial Sequence
  Description of Artificial Sequence: Synthetic oligonucleotide
  Category: spacer
  Description: MGA3-8 sgRNA spacer 1 (targeting E. coli lacZ)
ttcatctgtggtgcaacgggcg

SEQ ID NO: 110 - DNA, 22 bp, Artificial Sequence
  Description of Artificial Sequence: Synthetic oligonucleotide
  Category: spacer
  Description: MGA3-8 sgRNA spacer 2 (targeting E. coli lacZ)
acgagcatcatcctctgcatgg

SEQ ID NO: 111 - DNA, 22 bp, Artificial Sequence
  Description of Artificial Sequence: Synthetic oligonucleotide
  Category: spacer
  Description: MGA3-8 sgRNA spacer 3 (targeting E. coli lacZ)
cgacccgcattgaccctaacgc

SEQ ID NO: 112 - DNA, 22 bp, Artificial Sequence
  Description of Artificial Sequence: Synthetic oligonucleotide
  Category: spacer
  Description: MGA4-5 sgRNA spacer 1 (targeting E. coli lacZ)
cacaaatcagcgatttccatgt

SEQ ID NO: 113 - DNA, 22 bp, Artificial Sequence
  Description of Artificial Sequence: Synthetic oligonucleotide
  Category: spacer
  Description: MGA4-5 sgRNA spacer 2 (targeting E. coli lacZ)
tgatgaagcagaacaactttaa

SEQ ID NO: 114 - DNA, 22 bp, Artificial Sequence
  Description of Artificial Sequence: Synthetic oligonucleotide
  Category: spacer
  Description: MGA4-5 sgRNA spacer 3 (targeting E. coli lacZ)
aatattgaaacccacggcatgg

SEQ ID NO: 115 - DNA, 22 bp, Artificial Sequence
  Description of Artificial Sequence: Synthetic oligonucleotide
  Category: spacer
  Description: MGA14-1 sgRNA spacer 1 (targeting E. coli lacZ)
tcaaaaaatggctttcgctacc

SEQ ID NO: 116 - DNA, 22 bp, Artificial Sequence
  Description of Artificial Sequence: Synthetic oligonucleotide
  Category: spacer
  Description: MGA14-1 sgRNA spacer 2 (targeting E. coli lacZ)
aagcagcgttgttgcagtgcac

SEQ ID NO: 117 - DNA, 22 bp, Artificial Sequence
  Description of Artificial Sequence: Synthetic oligonucleotide
  Category: spacer
  Description: MGA14-1 sgRNA spacer 3 (targeting E. coli lacZ)
tcagccggaaaacctaccggat

SEQ ID NO: 118 - DNA, 22 bp, Artificial Sequence
  Description of Artificial Sequence: Synthetic oligonucleotide
  Category: spacer
  Description: MGA15-1 sgRNA spacer 1 (targeting E. coli lacZ)
gaagatcaggatatgtggcgga

SEQ ID NO: 119 - DNA, 22 bp, Artificial Sequence
  Description of Artificial Sequence: Synthetic oligonucleotide
  Category: spacer
  Description: MGA15-1 sgRNA spacer 2 (targeting E. coli lacZ)
aacgtcgaaaacccgaaactgt

SEQ ID NO: 120 - DNA, 22 bp, Artificial Sequence
  Description of Artificial Sequence: Synthetic oligonucleotide
  Category: spacer
  Description: MGA15-1 sgRNA spacer 3 (targeting E. coli lacZ)
aaacccacggcatggtgccaat

SEQ ID NO: 121 - DNA, 22 bp, Artificial Sequence
  Description of Artificial Sequence: Synthetic oligonucleotide
  Category: spacer
  Description: MGA18-1 sgRNA spacer 1 (targeting E. coli lacZ)
aaaacccgaaactgtggagcgc

SEQ ID NO: 122 - DNA, 22 bp, Artificial Sequence
  Description of Artificial Sequence: Synthetic oligonucleotide
  Category: spacer
  Description: MGA18-1 sgRNA spacer 2 (targeting E. coli lacZ)
ggcaactctggctcacagtacg

SEQ ID NO: 123 - DNA, 22 bp, Artificial Sequence
  Description of Artificial Sequence: Synthetic oligonucleotide
  Category: spacer
  Description: MGA18-1 sgRNA spacer 3 (targeting E. coli lacZ)
ccggaaaacctaccggattgat

SEQ ID NO: 124 - DNA, 20 bp, Artificial Sequence
  Description of Artificial Sequence: Synthetic oligonucleotide
  Category: spacer
  Description: ABE8.17m sgRNA spacer 1 (targeting E. coli lacZ)
tttctttcacagatgtggat

SEQ ID NO: 125 - DNA, 20 bp, Artificial Sequence
  Description of Artificial Sequence: Synthetic oligonucleotide
  Category: spacer
  Description: ABE8.17m sgRNA spacer 2 (targeting E. coli lacZ)
caggatatgtggcggatgag

SEQ ID NO: 126 - DNA, 20 bp, Artificial Sequence
  Description of Artificial Sequence: Synthetic oligonucleotide
  Category: spacer
  Description: ABE8.17m sgRNA spacer 3 (targeting E. coli lacZ)
tgcgaatacgcccacgcgat

SEQ ID NO: 127 - DNA, 22 bp, Artificial Sequence
  Description of Artificial Sequence: Synthetic oligonucleotide
  Category: spacer
  Description: MGC1-4 sgRNA spacer 1 (targeting E. coli lacZ)
cggcgtttcatctgtggtgcaa

SEQ ID NO: 128 - DNA, 22 bp, Artificial Sequence
  Description of Artificial Sequence: Synthetic oligonucleotide
  Category: spacer
  Description: MGC1-4 sgRNA spacer 2 (targeting E. coli lacZ)
gccaggacagtcgtttgccgtc

SEQ ID NO: 129 - DNA, 22 bp, Artificial Sequence
  Description of Artificial Sequence: Synthetic oligonucleotide
  Category: spacer
  Description: MGC1-4 sgRNA spacer 3 (targeting E. coli lacZ)
tcagccgcgctgtactggaggc

SEQ ID NO: 130 - DNA, 22 bp, Artificial Sequence
  Description of Artificial Sequence: Synthetic oligonucleotide
  Category: spacer
  Description: MGC1-6 sgRNA spacer 1 (targeting E. coli lacZ)
cccttcccaacagttgcgcagc

SEQ ID NO: 131 - DNA, 22 bp, Artificial Sequence
  Description of Artificial Sequence: Synthetic oligonucleotide
  Category: spacer
  Description: MGC1-6 sgRNA spacer 2 (targeting E. coli lacZ)
ctgtcgtcgtcccctcaaactg

SEQ ID NO: 132 - DNA, 22 bp, Artificial Sequence
  Description of Artificial Sequence: Synthetic oligonucleotide
  Category: spacer
  Description: MGC1-6 sgRNA spacer 3 (targeting E. coli lacZ)
ctacgtctgaacgtcgaaaacc

SEQ ID NO: 133 - DNA, 22 bp, Artificial Sequence
  Description of Artificial Sequence: Synthetic oligonucleotide
  Category: spacer
  Description: MGC3-6 sgRNA spacer 1 (targeting E. coli lacZ)
gtgacggcagttatctggaaga

SEQ ID NO: 134 - DNA, 22 bp, Artificial Sequence
  Description of Artificial Sequence: Synthetic oligonucleotide
  Category: spacer
  Description: MGC3-6 sgRNA spacer 2 (targeting E. coli lacZ)
atgatttcagccgcgctgtact

SEQ ID NO: 135 - DNA, 22 bp, Artificial Sequence
  Description of Artificial Sequence: Synthetic oligonucleotide
  Category: spacer
  Description: MGC3-6 sgRNA spacer 3 (targeting E. coli lacZ)
ttactgccgcctgttttgaccg

SEQ ID NO: 136 - DNA, 22 bp, Artificial Sequence
  Description of Artificial Sequence: Synthetic oligonucleotide
  Category: spacer
  Description: MGC3-7 sgRNA spacer 1 (targeting E. coli lacZ)
cgaatggcgctttgcctggttt

SEQ ID NO: 137 - DNA, 22 bp, Artificial Sequence
  Description of Artificial Sequence: Synthetic oligonucleotide
  Category: spacer
  Description: MGC3-7 sgRNA spacer 2 (targeting E. coli lacZ)
tcccctcaaactggcagatgca

SEQ ID NO: 138 - DNA, 22 bp, Artificial Sequence
  Description of Artificial Sequence: Synthetic oligonucleotide
  Category: spacer
  Description: MGC3-7 sgRNA spacer 3 (targeting E. coli lacZ)
atctacaccaacgtgacctatc

SEQ ID NO: 139 - DNA, 22 bp, Artificial Sequence
  Description of Artificial Sequence: Synthetic oligonucleotide
  Category: spacer
  Description: MGC3-8 sgRNA spacer 1 (targeting E. coli lacZ)
ttcatctgtggtgcaacgggcg

SEQ ID NO: 140 - DNA, 22 bp, Artificial Sequence
  Description of Artificial Sequence: Synthetic oligonucleotide
  Category: spacer
  Description: MGC3-8 sgRNA spacer 2 (targeting E. coli lacZ)
acgagcatcatcctctgcatgg

SEQ ID NO: 141 - DNA, 22 bp, Artificial Sequence
  Description of Artificial Sequence: Synthetic oligonucleotide
  Category: spacer
  Description: MGC3-8 sgRNA spacer 3 (targeting E. coli lacZ)
cgacccgcattgaccctaacgc

SEQ ID NO: 142 - DNA, 22 bp, Artificial Sequence
  Description of Artificial Sequence: Synthetic oligonucleotide
  Category: spacer
  Description: MGC4-5 sgRNA spacer 1 (targeting E. coli lacZ)
caacgggcgctgggtcggttac

SEQ ID NO: 143 - DNA, 22 bp, Artificial Sequence
  Description of Artificial Sequence: Synthetic oligonucleotide
  Category: spacer
  Description: MGC4-5 sgRNA spacer 2 (targeting E. coli lacZ)
cacaaatcagcgatttccatgt

SEQ ID NO: 144 - DNA, 22 bp, Artificial Sequence
  Description of Artificial Sequence: Synthetic oligonucleotide
  Category: spacer
  Description: MGC4-5 sgRNA spacer 3 (targeting E. coli lacZ)
aaggcggcggagccgacaccac

SEQ ID NO: 145 - DNA, 22 bp, Artificial Sequence
  Description of Artificial Sequence: Synthetic oligonucleotide
  Category: spacer
  Description: MGC14-1 sgRNA spacer 1 (targeting E. coli lacZ)
cggtcaatccgccgtttgttcc

SEQ ID NO: 146 - DNA, 22 bp, Artificial Sequence
  Description of Artificial Sequence: Synthetic oligonucleotide
  Category: spacer
  Description: MGC14-1 sgRNA spacer 2 (targeting E. coli lacZ)
tcctttgcgaatacgcccacgc

SEQ ID NO: 147 - DNA, 22 bp, Artificial Sequence
  Description of Artificial Sequence: Synthetic oligonucleotide
  Category: spacer
  Description: MGC14-1 sgRNA spacer 3 (targeting E. coli lacZ)
ggtcggcttacggcggtgattt

SEQ ID NO: 148 - DNA, 22 bp, Artificial Sequence
  Description of Artificial Sequence: Synthetic oligonucleotide
  Category: spacer
  Description: MGC15-1 sgRNA spacer 1 (targeting E. coli lacZ)
gccgatcgcgtcacactacgtc

SEQ ID NO: 149 - DNA, 22 bp, Artificial Sequence
  Description of Artificial Sequence: Synthetic oligonucleotide
  Category: spacer
  Description: MGC15-1 sgRNA spacer 2 (targeting E. coli lacZ)
gatccgcgctggctaccggcga

SEQ ID NO: 150 - DNA, 22 bp, Artificial Sequence
  Description of Artificial Sequence: Synthetic oligonucleotide
  Category: spacer
  Description: MGC15-1 sgRNA spacer 3 (targeting E. coli lacZ)
ccttcccgcccggtgcagtatg

SEQ ID NO: 151 - DNA, 22 bp, Artificial Sequence
  Description of Artificial Sequence: Synthetic oligonucleotide
  Category: spacer
  Description: MGC18-1 sgRNA spacer 1 (targeting E. coli lacZ)
tcagccgcgctgtactggaggc

SEQ ID NO: 152 - DNA, 22 bp, Artificial Sequence
  Description of Artificial Sequence: Synthetic oligonucleotide
  Category: spacer
  Description: MGC18-1 sgRNA spacer 2 (targeting E. coli lacZ)
gaccagcccttcccggctgtgc

SEQ ID NO: 153 - DNA, 22 bp, Artificial Sequence
  Description of Artificial Sequence: Synthetic oligonucleotide
  Category: spacer
  Description: MGC18-1 sgRNA spacer 3 (targeting E. coli lacZ)
tccgtttatccgggcaaaccat

SEQ ID NO: 154 - DNA, 20 bp, Artificial Sequence
  Description of Artificial Sequence: Synthetic oligonucleotide
  Category: spacer
  Description: BE3 sgRNA spacer 1 (targeting E. coli lacZ)
cctctggatgtcgctccaca

SEQ ID NO: 155 - DNA, 20 bp, Artificial Sequence
  Description of Artificial Sequence: Synthetic oligonucleotide
  Category: spacer
  Description: BE3 sgRNA spacer 2 (targeting E. coli lacZ)
gggacgcgcgaattgaatta

SEQ ID NO: 156 - DNA, 20 bp, Artificial Sequence
  Description of Artificial Sequence: Synthetic oligonucleotide
  Category: spacer
  Description: BE3 sgRNA spacer 3 (targeting E. coli lacZ)
cgttttacaacgtcgtgact

SEQ ID NO: 157 - DNA, 40 bp, Artificial Sequence
  Description of Artificial Sequence: Synthetic primer
  Category: primer
  Description: Site-directed mutagenesis of MG1-4 (D9A)
tgaaaaagaaagttttcgcatttgcgcttggtaaagcaag

SEQ ID NO: 158 - DNA, 27 bp, Artificial Sequence
  Description of Artificial Sequence: Synthetic primer
  Category: primer
  Description: Site-directed mutagenesis of MG1-4 (D9A)
tggtatatctccttcttaaagttaaac

SEQ ID NO: 159 - DNA, 35 bp, Artificial Sequence
  Description of Artificial Sequence: Synthetic primer
  Category: primer
  Description: Site-directed mutagenesis of MG1-6 (D13A)
accatgtttggggctttgcgattggcaaagggtct

SEQ ID NO: 160 - DNA, 25 bp, Artificial Sequence
  Description of Artificial Sequence: Synthetic primer
  Category: primer
  Description: Site-directed mutagenesis of MG1-6 (D13A)
tgttcttttctttctccatggtata

SEQ ID NO: 161 - DNA, 35 bp, Artificial Sequence
  Description of Artificial Sequence: Synthetic primer
  Category: primer
  Description: Site-directed mutagenesis of MG3-6 (D13A)
attatcgcattggcgtggcggtcggggatcgcagc

SEQ ID NO: 162 - DNA, 21 bp, Artificial Sequence
  Description of Artificial Sequence: Synthetic primer
  Category: primer
  Description: Site-directed mutagenesis of MG3-6 (D13A)
tcttcatatcggttgacatgg

SEQ ID NO: 163 - DNA, 35 bp, Artificial Sequence
  Description of Artificial Sequence: Synthetic primer
  Category: primer
  Description: Site-directed mutagenesis of MG3-7 (D12A)
agtaccgcattggcatcgcggtgggcgatcgctcg

SEQ ID NO: 164 - DNA, 22 bp, Artificial Sequence
  Description of Artificial Sequence: Synthetic primer
  Category: primer
  Description: Site-directed mutagenesis of MG3-7 (D12A)
tagtatgttcgctcatggtata

SEQ ID NO: 165 - DNA, 35 bp, Artificial Sequence
  Description of Artificial Sequence: Synthetic primer
  Category: primer
  Description: Site-directed mutagenesis of MG3-8 (D13A)
attaccgcattggcgtggcggtaggtgatcgtagt

SEQ ID NO: 166 - DNA, 21 bp, Artificial Sequence
  Description of Artificial Sequence: Synthetic primer
  Category: primer
  Description: Site-directed mutagenesis of MG3-8 (D13A)
tcttcatatcagtgctcatgg

SEQ ID NO: 167 - DNA, 35 bp, Artificial Sequence
  Description of Artificial Sequence: Synthetic primer
  Category: primer
  Description: Site-directed mutagenesis of MG4-5 (D17A)
gctactgcttgggcctggcggtaggtgtgcaagga

SEQ ID NO: 168 - DNA, 18 bp, Artificial Sequence
  Description of Artificial Sequence: Synthetic primer
  Category: primer
  Description: Site-directed mutagenesis of MG4-5 (D17A)
tggtcgcctgcagggtct

SEQ ID NO: 169 - DNA, 35 bp, Artificial Sequence
  Description of Artificial Sequence: Synthetic primer
  Category: primer
  Description: Site-directed mutagenesis of MG14-1 (D23A)
acctggttctgggtatggcgccgggcatcgcctca

SEQ ID NO: 170 - DNA, 18 bp, Artificial Sequence
  Description of Artificial Sequence: Synthetic primer
  Category: primer
  Description: Site-directed mutagenesis of MG14-1 (D23A)
ggcgaggcaagcctaatt

SEQ ID NO: 171 - DNA, 35 bp, Artificial Sequence
  Description of Artificial Sequence: Synthetic primer
  Category: primer
  Description: Site-directed mutagenesis of MG15-1 (D8A)
actatgtgctcggcctggcggtcggtattgcttca

SEQ ID NO: 172 - DNA, 25 bp, Artificial Sequence
  Description of Artificial Sequence: Synthetic primer
  Category: primer
  Description: Site-directed mutagenesis of MG15-1 (D8A)
tcatggtatatctccttcttaaagt

SEQ ID NO: 173 - DNA, 40 bp, Artificial Sequence
  Description of Artificial Sequence: Synthetic primer
  Category: primer
  Description: Site-directed mutagenesis of MG18-1 (D12A)
taaagagtactacattggtctggcgggtggtacggactcg

SEQ ID NO: 174 - DNA, 21 bp, Artificial Sequence
  Description of Artificial Sequence: Synthetic primer
  Category: primer
  Description: Site-directed mutagenesis of MG18-1 (D12A)
ctctggtccatggtatatctc

SEQ ID NO: 175 - DNA, 42 bp, Artificial Sequence
  Description of Artificial Sequence: Synthetic primer
  Category: primer
  Description: Site-directed mutagenesis of SpCas9 (D10A)
gataagaaatactcaataggactggcgattggcacaaatagc

SEQ ID NO: 176 - DNA, 25 bp, Artificial Sequence
  Description of Artificial Sequence: Synthetic primer
  Category: primer
  Description: Site-directed mutagenesis of SpCas9 (D10A)
catggtatatctccttcttaaagtt

SEQ ID NO: 177 - DNA, 21 bp, Artificial Sequence
  Description of Artificial Sequence: Synthetic primer
  Category: primer
  Description: For lacZ sequencing
ccaggctttacactttatgct

SEQ ID NO: 178 - DNA, 19 bp, Artificial Sequence
  Description of Artificial Sequence: Synthetic primer
  Category: primer
  Description: For lacZ sequencing
gtatgtggtggatgaagcc

SEQ ID NO: 179 - DNA, 18 bp, Artificial Sequence
  Description of Artificial Sequence: Synthetic primer
  Category: primer
  Description: Amplify the fragment for nickase assay
agcttccagggggaaacg

SEQ ID NO: 180 - DNA, 26 bp, Artificial Sequence
  Description of Artificial Sequence: Synthetic primer
  Category: primer
  Description: Amplify the fragment for nickase assay
attaacctataaaaataggcgtatca

SEQ ID NO: 181 - DNA, 60 bp, Artificial Sequence
  Description of Artificial Sequence: Synthetic primer
  Category: primer
  Description: Amplify T7 promoter-His tag-adenine deaminase for MGA entry plasmid
gatataccatgggcagcagtcatcatcatcaccatcactccgaggttgaatttagtcatg

SEQ ID NO: 182 - DNA, 60 bp, Artificial Sequence
  Description of Artificial Sequence: Synthetic primer
  Category: primer
  Description: Amplify T7 promoter-His tag-adenine deaminase for MGA entry plasmid
agactttcctcttcttcttgggagacccgccagagcctcgaggacccaccagagctgcct

SEQ ID NO: 183 - DNA, 55 bp, Artificial Sequence
  Description of Artificial Sequence: Synthetic primer
  Category: primer
  Description: Amplify SV40 NLS-vector backbone for MGA entry plasmid
tctggcgggtctcccaagaagaagaggaaagtctaagatccggctgctaacaaag

SEQ ID NO: 184 - DNA, 45 bp, Artificial Sequence
  Description of Artificial Sequence: Synthetic primer
  Category: primer
  Description: Amplify SV40 NLS-vector backbone for MGA entry plasmid
ctccttgcatgctctagaattaattaaaccattccttgcggcggc

SEQ ID NO: 185 - DNA, 48 bp, Artificial Sequence
  Description of Artificial Sequence: Synthetic primer
  Category: primer
  Description: Amplify vector backbone for MGA entry plasmid
aggaatggtttaattaattctagagcatgcaaggagatggcgcccaac

SEQ ID NO: 186 - DNA, 56 bp, Artificial Sequence
  Description of Artificial Sequence: Synthetic primer
  Category: primer
  Description: Amplify vector backbone for MGA entry plasmid
gtgatggtgatgatgatgactgctgcccatggtatatctccttcttaaagttaaac

SEQ ID NO: 187 - DNA, 60 bp, Artificial Sequence
  Description of Artificial Sequence: Synthetic primer
  Category: primer
  Description: Amplify T7 promoter-His-tag-cytosine deaminase for MGC entry plasmid
aggagatataccatgggcagcagtcatcatcatcaccatcacatgtcgtctgagaccggg

SEQ ID NO: 188 - DNA, 60 bp, Artificial Sequence
  Description of Artificial Sequence: Synthetic primer
  Category: primer
  Description: Amplify T7 promoter-His-tag-cytosine deaminase for MGC entry plasmid
taatatctgaaagattggtagaaccaccagacccgcggcagattcaggtgtcgcactttc

SEQ ID NO: 189 - DNA, 44 bp, Artificial Sequence
  Description of Artificial Sequence: Synthetic primer
  Category: primer
  Description: Amplify UGI-SV40 NLS for MGC entry plasmid
cgacacctgaatctgccgcgggtctggtggttctaccaatcttt

SEQ ID NO: 190 - DNA, 60 bp, Artificial Sequence
  Description of Artificial Sequence: Synthetic primer
  Category: primer
  Description: Amplify UGI-SV40 NLS for MGC entry plasmid
ttagactttcctcttcttcttgggagaaccaccagaaagcattttgatcttgttttcgcc

SEQ ID NO: 191 - DNA, 54 bp, Artificial Sequence
  Description of Artificial Sequence: Synthetic primer
  Category: primer
  Description: Amplify SV40 NLS-vector backbone for MGC entry plasmid
ctggtggttctcccaagaagaagaggaaagtctaagatccggctgctaacaaag

SEQ ID NO: 192 - DNA, 45 bp, Artificial Sequence
  Description of Artificial Sequence: Synthetic primer
  Category: primer
  Description: Amplify SV40 NLS-vector backbone for MGC entry plasmid
ctccttgcatgctctagaattaattaaccattccttgcggcggcg

SEQ ID NO: 193 - DNA, 48 bp, Artificial Sequence
  Description of Artificial Sequence: Synthetic primer
  Category: primer
  Description: Amplify vector backbone for MGC entry plasmid
aggaatggttaattaattctagagcatgcaaggagatggcgcccaaca

SEQ ID NO: 194 - DNA, 50 bp, Artificial Sequence
  Description of Artificial Sequence: Synthetic primer
  Category: primer
  Description: Amplify vector backbone for MGC entry plasmid
gtgatgatgatgactgctgcccatggtatatctccttcttaaagttaaac

SEQ ID NO: 195 - DNA, 55 bp, Artificial Sequence
  Description of Artificial Sequence: Synthetic primer
  Category: primer
  Description: Amplify nMG1-4 (D9A) for pMGA expression plasmid
aaagtagtggaggcagctctggtgggtccatgaaaaagaaagttttcgcatttgc

SEQ ID NO: 196 - DNA, 55 bp, Artificial Sequence
  Description of Artificial Sequence: Synthetic primer
  Category: primer
  Description: Amplify nMG1-4 (D9A) for pMGA expression plasmid
ctcttcttcttgggagacccgccagagcctttgctttcgacttttttaaattcgg

SEQ ID NO: 197 - DNA, 54 bp, Artificial Sequence
  Description of Artificial Sequence: Synthetic primer
  Category: primer
  Description: Amplify nMG1-6 (D13A) for pMGA expression plasmid
gaaagtagtggaggcagctctggtgggtccatggagaaagaaaagaacaaccat

SEQ ID NO: 198 - DNA, 50 bp, Artificial Sequence
  Description of Artificial Sequence: Synthetic primer
  Category: primer
  Description: Amplify nMG1-6 (D13A) for pMGA expression plasmid
cctcttcttcttgggagacccgccagagcccagttcacttaactcgacgc

SEQ ID NO: 199 - DNA, 55 bp, Artificial Sequence
  Description of Artificial Sequence: Synthetic primer
  Category: primer
  Description: Amplify nMG3-6 (D13A) for pMGA expression plasmid
gaaagtagtggaggcagctctggtgggtccatgtcaaccgatatgaagaattatc

SEQ ID NO: 200 - DNA, 48 bp, Artificial Sequence
  Description of Artificial Sequence: Synthetic primer
  Category: primer
  Description: Amplify nMG3-6 (D13A) for pMGA expression plasmid
cctcttcttcttgggagacccgccagagcccccctctactccaagcgc

SEQ ID NO: 201 - DNA, 52 bp, Artificial Sequence
  Description of Artificial Sequence: Synthetic primer
  Category: primer
  Description: Amplify nMG3-7 (D12A) for pMGA expression plasmid
gaaagtagtggaggcagctctggtgggtccatgagcgaacatactaagtacc

SEQ ID NO: 202 - DNA, 50 bp, Artificial Sequence
  Description of Artificial Sequence: Synthetic primer
  Category: primer
  Description: Amplify nMG3-7 (D12A) for pMGA expression plasmid
cctcttcttcttgggagacccgccagagccttcttgttcatcaagggctg

SEQ ID NO: 203 - DNA, 54 bp, Artificial Sequence
  Description of Artificial Sequence: Synthetic primer
  Category: primer
  Description: Amplify nMG3-8 (D13A) for pMGA expression plasmid
gaaagtagtggaggcagctctggtgggtccatgagcactgatatgaagaattac

SEQ ID NO: 204 - DNA, 48 bp, Artificial Sequence
  Description of Artificial Sequence: Synthetic primer
  Category: primer
  Description: Amplify nMG3-8 (D13A) for pMGA expression plasmid
cctcttcttcttgggagacccgccagagccaccctcgacgcctaacgc

SEQ ID NO: 205 - DNA, 48 bp, Artificial Sequence
  Description of Artificial Sequence: Synthetic primer
  Category: primer
  Description: Amplify nMG4-5 (D17A) for pMGA expression plasmid
gaaagtagtggaggcagctctggtgggtccatgggagatcagcagacc

SEQ ID NO: 206 - DNA, 48 bp, Artificial Sequence
  Description of Artificial Sequence: Synthetic primer
  Category: primer
  Description: Amplify nMG4-5 (D17A) for pMGA expression plasmid
cctcttcttcttgggagacccgccagagccatcgttcgcgggaaacac

SEQ ID NO: 207 - DNA, 55 bp, Artificial Sequence
  Description of Artificial Sequence: Synthetic primer
  Category: primer
  Description: Amplify nMG14-1 (D23A) for pMGA expression plasmid
gaaagtagtggaggcagctctggtgggtccatggaaattacaattaaccgtgaga

SEQ ID NO: 208 - DNA, 48 bp, Artificial Sequence
  Description of Artificial Sequence: Synthetic primer
  Category: primer
  Description: Amplify nMG14-1 (D23A) for pMGA expression plasmid
cctcttcttcttgggagacccgccagagcccttaatcgggctctcacg

SEQ ID NO: 209 - DNA, 49 bp, Artificial Sequence
  Description of Artificial Sequence: Synthetic primer
  Category: primer
  Description: Amplify nMG15-1 (D8A) for pMGA expression plasmid
gaaagtagtggaggcagctctggtgggtccatgaactatgtgctcggcc

SEQ ID NO: 210 - DNA, 48 bp, Artificial Sequence
  Description of Artificial Sequence: Synthetic primer
  Category: primer
  Description: Amplify nMG15-1 (D8A) for pMGA expression plasmid
cctcttcttcttgggagacccgccagagccacggaacgtttggcgctt

SEQ ID NO: 211 - DNA, 52 bp, Artificial Sequence
  Description of Artificial Sequence: Synthetic primer
  Category: primer
  Description: Amplify nMG18-1 (D12A) for pMGA expression plasmid
gaaagtagtggaggcagctctggtgggtccatggaccagagtaaagagtact

SEQ ID NO: 212 - DNA, 54 bp, Artificial Sequence
  Description of Artificial Sequence: Synthetic primer
  Category: primer
  Description: Amplify nMG18-1 (D12A) for pMGA expression plasmid
cctcttcttcttgggagacccgccagagcccagatcatttaaacacacctcttg

SEQ ID NO: 213 - DNA, 55 bp, Artificial Sequence
  Description of Artificial Sequence: Synthetic primer
  Category: primer
  Description: Amplify SpCas9 (D10A) for pMGA expression plasmid
gaaagtagtggaggcagctctggtgggtccatggataagaaatactcaataggac

SEQ ID NO: 214 - DNA, 48 bp, Artificial Sequence
  Description of Artificial Sequence: Synthetic primer
  Category: primer
  Description: Amplify SpCas9 (D10A) for pMGA expression plasmid
cctcttcttcttgggagacccgccagagccgtcacctcccagctgact

SEQ ID NO: 215 - DNA, 56 bp, Artificial Sequence
  Description of Artificial Sequence: Synthetic primer
  Category: primer
  Description: Amplify nMG1-4 (D9A) for pMGC expression plasmid
acatccgaaagtgcgacacctgaatctgccatgaaaaagaaagttttcgcatttgc

SEQ ID NO: 216 - DNA, 56 bp, Artificial Sequence
  Description of Artificial Sequence: Synthetic primer
  Category: primer
  Description: Amplify nMG1-4 (D9A) for pMGC expression plasmid
atctgaaagattggtagaaccaccagaccctttgctttcgacttttttaaattcgg

SEQ ID NO: 217 - DNA, 54 bp, Artificial Sequence
  Description of Artificial Sequence: Synthetic primer
  Category: primer
  Description: Amplify nMG1-6 (D13A) for pMGC expression plasmid
acatccgaaagtgcgacacctgaatctgccatggagaaagaaaagaacaaccat

SEQ ID NO: 218 - DNA, 50 bp, Artificial Sequence
  Description of Artificial Sequence: Synthetic primer
  Category: primer
  Description: Amplify nMG1-6 (D13A) for pMGC expression plasmid
atctgaaagattggtagaaccaccagaccccagttcacttaactcgacgc

SEQ ID NO: 219 - DNA, 54 bp, Artificial Sequence
  Description of Artificial Sequence: Synthetic primer
  Category: primer
  Description: Amplify nMG3-6 (D13A) for pMGC expression plasmid
catccgaaagtgcgacacctgaatctgccatgtcaaccgatatgaagaattatc

SEQ ID NO: 220 - DNA, 48 bp, Artificial Sequence
  Description of Artificial Sequence: Synthetic primer
  Category: primer
  Description: Amplify nMG3-6 (D13A) for pMGC expression plasmid
atctgaaagattggtagaaccaccagaccccccctctactccaagcgc

SEQ ID NO: 221 - DNA, 52 bp, Artificial Sequence
  Description of Artificial Sequence: Synthetic primer
  Category: primer
  Description: Amplify nMG3-7 (D12A) for pMGC expression plasmid
acatccgaaagtgcgacacctgaatctgccatgagcgaacatactaagtacc

SEQ ID NO: 222 - DNA, 50 bp, Artificial Sequence
  Description of Artificial Sequence: Synthetic primer
  Category: primer
  Description: Amplify nMG3-7 (D12A) for pMGC expression plasmid
atctgaaagattggtagaaccaccagacccttcttgttcatcaagggctg

SEQ ID NO: 223 - DNA, 54 bp, Artificial Sequence
  Description of Artificial Sequence: Synthetic primer
  Category: primer
  Description: Amplify nMG3-8 (D13A) for pMGC expression plasmid
acatccgaaagtgcgacacctgaatctgccatgagcactgatatgaagaattac

SEQ ID NO: 224 - DNA, 48 bp, Artificial Sequence
  Description of Artificial Sequence: Synthetic primer
  Category: primer
  Description: Amplify nMG3-8 (D13A) for pMGC expression plasmid
atctgaaagattggtagaaccaccagacccaccctcgacgcctaacgc

SEQ ID NO: 225 - DNA, 48 bp, Artificial Sequence
  Description of Artificial Sequence: Synthetic primer
  Category: primer
  Description: Amplify nMG4-5 (D17A) for pMGC expression plasmid
acatccgaaagtgcgacacctgaatctgccatgggagatcagcagacc

SEQ ID NO: 226 - DNA, 48 bp, Artificial Sequence
  Description of Artificial Sequence: Synthetic primer
  Category: primer
  Description: Amplify nMG4-5 (D17A) for pMGC expression plasmid
atctgaaagattggtagaaccaccagacccatcgttcgcgggaaacac

SEQ ID NO: 227 - DNA, 54 bp, Artificial Sequence
  Description of Artificial Sequence: Synthetic primer
  Category: primer
  Description: Amplify nMG14-1 (D23A) for pMGC expression plasmid
acatccgaaagtgcgacacctgaatctgccatggaaattacaattaaccgtgag

SEQ ID NO: 228 - DNA, 49 bp, Artificial Sequence
  Description of Artificial Sequence: Synthetic primer
  Category: primer
  Description: Amplify nMG14-1 (D23A) for pMGC expression plasmid
atctgaaagattggtagaaccaccagaccccttaatcgggctctcacga

SEQ ID NO: 229 - DNA, 49 bp, Artificial Sequence
  Description of Artificial Sequence: Synthetic primer
  Category: primer
  Description: Amplify nMG15-1 (D8A) for pMGC expression plasmid
acatccgaaagtgcgacacctgaatctgccatgaactatgtgctcggcc

SEQ ID NO: 230 - DNA, 48 bp, Artificial Sequence
  Description of Artificial Sequence: Synthetic primer
  Category: primer
  Description: Amplify nMG15-1 (D8A) for pMGC expression plasmid
atctgaaagattggtagaaccaccagacccacggaacgtttggcgctt

SEQ ID NO: 231 - DNA, 49 bp, Artificial Sequence
  Description of Artificial Sequence: Synthetic primer
  Category: primer
  Description: Amplify nMG18-1 (D12A) for pMGC expression plasmid
atccgaaagtgcgacacctgaatctgccatggaccagagtaaagagtac

SEQ ID NO: 232 - DNA, 55 bp, Artificial Sequence
  Description of Artificial Sequence: Synthetic primer
  Category: primer
  Description: Amplify nMG18-1 (D12A) for pMGC expression plasmid
tatctgaaagattggtagaaccaccagaccccagatcatttaaacacacctcttg

SEQ ID NO: 233 - DNA, 55 bp, Artificial Sequence
  Description of Artificial Sequence: Synthetic primer
  Category: primer
  Description: Amplify SpCas9 (D10A) for pMGC expression plasmid
acatccgaaagtgcgacacctgaatctgccatggataagaaatactcaataggac

SEQ ID NO: 234 - DNA, 48 bp, Artificial Sequence
  Description of Artificial Sequence: Synthetic primer
  Category: primer
  Description: Amplify SpCas9 (D10A) for pMGC expression plasmid
atctgaaagattggtagaaccaccagacccgtcacctcccagctgact

SEQ ID NO: 235 - DNA, 44 bp, Artificial Sequence
  Description of Artificial Sequence: Synthetic primer
  Category: primer
  Description: Amplify MGA1-4_sgRNA spacer 1
ggtcaaattcagacggcaaacgctatagtgagtcgtattaaggt

SEQ ID NO: 236 - DNA, 50 bp, Artificial Sequence
  Description of Artificial Sequence: Synthetic primer
  Category: primer
  Description: Amplify MGA1-4_sgRNA spacer 1
tatagcgtttgccgtctgaatttgaccgttttgatttactcgaaagagtc

SEQ ID NO: 237 - DNA, 50 bp, Artificial Sequence
  Description of Artificial Sequence: Synthetic primer
  Category: primer
  Description: Amplify MGA1-4_sgRNA spacer 2
caaaactccgccacatatcctgatcttcctatagtgagtcgtattaaggt

SEQ ID NO: 238 - DNA, 50 bp, Artificial Sequence
  Description of Artificial Sequence: Synthetic primer
  Category: primer
  Description: Amplify MGA1-4_sgRNA spacer 2
tataggaagatcaggatatgtggcggagttttgatttactcgaaagagtc

SEQ ID NO: 239 - DNA, 50 bp, Artificial Sequence
  Description of Artificial Sequence: Synthetic primer
  Category: primer
  Description: Amplify MGA1-4_sgRNA spacer 3
caaaacccataaagaaactgttacccgtctatagtgagtcgtattaaggt

SEQ ID NO: 240 - DNA, 50 bp, Artificial Sequence
  Description of Artificial Sequence: Synthetic primer
  Category: primer
  Description: Amplify MGA1-4_sgRNA spacer 3
tatagacgggtaacagtttctttatgggttttgatttactcgaaagagtc

SEQ ID NO: 241 - DNA, 50 bp, Artificial Sequence
  Description of Artificial Sequence: Synthetic primer
  Category: primer
  Description: Amplify MGA1-6_sgRNA spacer 1
caaaacgtagtcggtttatgcagcaacgctatagtgagtcgtattaaggt

SEQ ID NO: 242 - DNA, 50 bp, Artificial Sequence
  Description of Artificial Sequence: Synthetic primer
  Category: primer
  Description: Amplify MGA1-6_sgRNA spacer 1
tagcgttgctgcataaaccgactacgttttgacttgaaaaagtcttaact

SEQ ID NO: 243 - DNA, 50 bp, Artificial Sequence
  Description of Artificial Sequence: Synthetic primer
  Category: primer
  Description: Amplify MGA1-6_sgRNA spacer 2
caaaacgcgctccacagtttcgggttttctatagtgagtcgtattaaggt

SEQ ID NO: 244 - DNA, 50 bp, Artificial Sequence
  Description of Artificial Sequence: Synthetic primer
  Category: primer
  Description: Amplify MGA1-6_sgRNA spacer 2
tagaaaacccgaaactgtggagcgcgttttgacttgaaaaagtcttaact

SEQ ID NO: 245 - DNA, 50 bp, Artificial Sequence
  Description of Artificial Sequence: Synthetic primer
  Category: primer
  Description: Amplify MGA1-6_sgRNA spacer 3
caaaaccagcagcagaccattttcaatcctatagtgagtcgtattaaggt

SEQ ID NO: 246 - DNA, 50 bp, Artificial Sequence
  Description of Artificial Sequence: Synthetic primer
  Category: primer
  Description: Amplify MGA1-6_sgRNA spacer 3
taggattgaaaatggtctgctgctggttttgacttgaaaaagtcttaact

SEQ ID NO: 247 - DNA, 50 bp, Artificial Sequence
  Description of Artificial Sequence: Synthetic primer
  Category: primer
  Description: Amplify MGA3-6_sgRNA spacer 1
ctcaaccataaagaaactgttacccgtactatagtgagtcgtattaaggt

SEQ ID NO: 248 - DNA, 50 bp, Artificial Sequence
  Description of Artificial Sequence: Synthetic primer
  Category: primer
  Description: Amplify MGA3-6_sgRNA spacer 1
atagtacgggtaacagtttctttatggttgagaatcgaaagattcttaat

SEQ ID NO: 249 - DNA, 50 bp, Artificial Sequence
  Description of Artificial Sequence: Synthetic primer
  Category: primer
  Description: Amplify MGA3-6_sgRNA spacer 2
ctcaacctggcggttaaattgccaacgcctatagtgagtcgtattaaggt

SEQ ID NO: 250 - DNA, 50 bp, Artificial Sequence
  Description of Artificial Sequence: Synthetic primer
  Category: primer
  Description: Amplify MGA3-6_sgRNA spacer 2
taggcgttggcaatttaaccgccaggttgagaatcgaaagattcttaata

SEQ ID NO: 251 - DNA, 50 bp, Artificial Sequence
  Description of Artificial Sequence: Synthetic primer
  Category: primer
  Description: Amplify MGA3-6_sgRNA spacer 3
ctcaactatggaaaccgtcgatattcagctatagtgagtcgtattaaggt

SEQ ID NO: 252 - DNA, 50 bp, Artificial Sequence
  Description of Artificial Sequence: Synthetic primer
  Category: primer
  Description: Amplify MGA3-6_sgRNA spacer 3
tagctgaatatcgacggtttccatagttgagaatcgaaagattcttaata

SEQ ID NO: 253 - DNA, 50 bp, Artificial Sequence
  Description of Artificial Sequence: Synthetic primer
  Category: primer
  Description: Amplify MGA3-7_sgRNA spacer 1
cccaacgctttcatcaacattaaatgtgctatagtgagtcgtattaaggt

SEQ ID NO: 254 - DNA, 50 bp, Artificial Sequence
  Description of Artificial Sequence: Synthetic primer
  Category: primer
  Description: Amplify MGA3-7_sgRNA spacer 1
tcactatagcacatttaatgttgatgaaagcgttgggaaccgaaaggttc

SEQ ID NO: 255 - DNA, 50 bp, Artificial Sequence
  Description of Artificial Sequence: Synthetic primer
  Category: primer
  Description: Amplify MGA3-7_sgRNA spacer 2
cccaaccatggaaatcgctgatttgtgtctatagtgagtcgtattaaggt

SEQ ID NO: 256 - DNA, 50 bp, Artificial Sequence
  Description of Artificial Sequence: Synthetic primer
  Category: primer
  Description: Amplify MGA3-7_sgRNA spacer 2
tcactatagacacaaatcagcgatttccatggttgggaaccgaaaggttc

SEQ ID NO: 257 - DNA, 50 bp, Artificial Sequence
  Description of Artificial Sequence: Synthetic primer
  Category: primer
  Description: Amplify MGA3-7_sgRNA spacer 3
cccaacgcaccatcgtctgctcatccatctatagtgagtcgtattaaggt

SEQ ID NO: 258 - DNA, 50 bp, Artificial Sequence
  Description of Artificial Sequence: Synthetic primer
  Category: primer
  Description: Amplify MGA3-7_sgRNA spacer 3
tcactatagatggatgagcagacgatggtgcgttgggaaccgaaaggttc

SEQ ID NO: 259 - DNA, 50 bp, Artificial Sequence
  Description of Artificial Sequence: Synthetic primer
  Category: primer
  Description: Amplify MGA4-5_sgRNA spacer 1
cacagcacatggaaatcgctgatttgtgctatagtgagtcgtattaaggt

SEQ ID NO: 260 - DNA, 48 bp, Artificial Sequence
  Description of Artificial Sequence: Synthetic primer
  Category: primer
  Description: Amplify MGA4-5_sgRNA spacer 1
cactatagcacaaatcagcgatttccatgtgctgtggcttgcggggga

SEQ ID NO: 261 - DNA, 50 bp, Artificial Sequence
  Description of Artificial Sequence: Synthetic primer
  Category: primer
  Description: Amplify MGA4-5_sgRNA spacer 2
cacagcttaaagttgttctgcttcatcactatagtgagtcgtattaaggt

SEQ ID NO: 262 - DNA, 48 bp, Artificial Sequence
  Description of Artificial Sequence: Synthetic primer
  Category: primer
  Description: Amplify MGA4-5_sgRNA spacer 2
cactatagtgatgaagcagaacaactttaagctgtggcttgcggggga

SEQ ID NO: 263 - DNA, 50 bp, Artificial Sequence
  Description of Artificial Sequence: Synthetic primer
  Category: primer
  Description: Amplify MGA4-5_sgRNA spacer 3
cacagcccatgccgtgggtttcaatattctatagtgagtcgtattaaggt

SEQ ID NO: 264 - DNA, 48 bp, Artificial Sequence
  Description of Artificial Sequence: Synthetic primer
  Category: primer
  Description: Amplify MGA4-5_sgRNA spacer 3
cactatagaatattgaaacccacggcatgggctgtggcttgcggggga

SEQ ID NO: 265 - DNA, 50 bp, Artificial Sequence
  Description of Artificial Sequence: Synthetic primer
  Category: primer
  Description: Amplify MGA14-1_sgRNA spacer 1
caagacggtagcgaaagccattttttgactatagtgagtcgtattaaggt

SEQ ID NO: 266 - DNA, 48 bp, Artificial Sequence
  Description of Artificial Sequence: Synthetic primer
  Category: primer
  Description: Amplify MGA14-1_sgRNA spacer 1
cactatagtcaaaaaatggctttcgctaccgtcttgagcgaaagctcc

SEQ ID NO: 267 - DNA, 50 bp, Artificial Sequence
  Description of Artificial Sequence: Synthetic primer
  Category: primer
  Description: Amplify MGA14-1_sgRNA spacer 2
caagacgtgcactgcaacaacgctgcttctatagtgagtcgtattaaggt

SEQ ID NO: 268 - DNA, 48 bp, Artificial Sequence
  Description of Artificial Sequence: Synthetic primer
  Category: primer
  Description: Amplify MGA14-1_sgRNA spacer 2
cactatagaagcagcgttgttgcagtgcacgtcttgagcgaaagctcc

SEQ ID NO: 269 - DNA, 50 bp, Artificial Sequence
  Description of Artificial Sequence: Synthetic primer
  Category: primer
  Description: Amplify MGA14-1_sgRNA spacer 3
caagacatccggtaggttttccggctgactatagtgagtcgtattaaggt

SEQ ID NO: 270 - DNA, 48 bp, Artificial Sequence
  Description of Artificial Sequence: Synthetic primer
  Category: primer
  Description: Amplify MGA14-1_sgRNA spacer 3
cactatagtcagccggaaaacctaccggatgtcttgagcgaaagctcc

SEQ ID NO: 271 - DNA, 50 bp, Artificial Sequence
  Description of Artificial Sequence: Synthetic primer
  Category: primer
  Description: Amplify MGA15-1_sgRNA spacer 1
tacaactccgccacatatcctgatcttcctatagtgagtcgtattaaggt

SEQ ID NO: 272 - DNA, 50 bp, Artificial Sequence
  Description of Artificial Sequence: Synthetic primer
  Category: primer
  Description: Amplify MGA15-1_sgRNA spacer 1
tataggaagatcaggatatgtggcggagttgtaattccctagaaataggt

SEQ ID NO: 273 - DNA, 50 bp, Artificial Sequence
  Description of Artificial Sequence: Synthetic primer
  Category: primer
  Description: Amplify MGA15-1_sgRNA spacer 2
tacaacacagtttcgggttttcgacgttctatagtgagtcgtattaaggt

SEQ ID NO: 274 - DNA, 50 bp, Artificial Sequence
  Description of Artificial Sequence: Synthetic primer
  Category: primer
  Description: Amplify MGA15-1_sgRNA spacer 2
tatagaacgtcgaaaacccgaaactgtgttgtaattccctagaaataggt

SEQ ID NO: 275 - DNA, 50 bp, Artificial Sequence
  Description of Artificial Sequence: Synthetic primer
  Category: primer
  Description: Amplify MGA15-1_sgRNA spacer 3
tacaacattggcaccatgccgtgggtttctatagtgagtcgtattaaggt

SEQ ID NO: 276 - DNA, 50 bp, Artificial Sequence
  Description of Artificial Sequence: Synthetic primer
  Category: primer
  Description: Amplify MGA15-1_sgRNA spacer 3
tatagaaacccacggcatggtgccaatgttgtaattccctagaaataggt

SEQ ID NO: 277 - DNA, 50 bp, Artificial Sequence
  Description of Artificial Sequence: Synthetic primer
  Category: primer
  Description: Amplify MGA18-1_sgRNA spacer 1
tcaaacgcgctccacagtttcgggttttctatagtgagtcgtattaaggt

SEQ ID NO: 278 - DNA, 50 bp, Artificial Sequence
  Description of Artificial Sequence: Synthetic primer
  Category: primer
  Description: Amplify MGA18-1_sgRNA spacer 1
tatagaaaacccgaaactgtggagcgcgtttgagagtagtgaaaactacg

SEQ ID NO: 279 - DNA, 50 bp, Artificial Sequence
  Description of Artificial Sequence: Synthetic primer
  Category: primer
  Description: Amplify MGA18-1_sgRNA spacer 2
tcaaaccgtactgtgagccagagttgccctatagtgagtcgtattaaggt

SEQ ID NO: 280 - DNA, 50 bp, Artificial Sequence
  Description of Artificial Sequence: Synthetic primer
  Category: primer
  Description: Amplify MGA18-1_sgRNA spacer 2
tatagggcaactctggctcacagtacggtttgagagtagtgaaaactacg

SEQ ID NO: 281 - DNA, 50 bp, Artificial Sequence
  Description of Artificial Sequence: Synthetic primer
  Category: primer
  Description: Amplify MGA18-1_sgRNA spacer 3
tcaaacatcaatccggtaggttttccggctatagtgagtcgtattaaggt

SEQ ID NO: 282 - DNA, 50 bp, Artificial Sequence
  Description of Artificial Sequence: Synthetic primer
  Category: primer
  Description: Amplify MGA18-1_sgRNA spacer 3
tatagccggaaaacctaccggattgatgtttgagagtagtgaaaactacg

SEQ ID NO: 283 - DNA, 41 bp, Artificial Sequence
  Description of Artificial Sequence: Synthetic primer
  Category: primer
  Description: Amplify ABE8.17m_sgRNA spacer 1
atccacatctgtgaaagaaactatagtgagtcgtattagga

SEQ ID NO: 284 - DNA, 45 bp, Artificial Sequence
  Description of Artificial Sequence: Synthetic primer
  Category: primer
  Description: Amplify ABE8.17m_sgRNA spacer 1
tttctttcacagatgtggatgttttagagctagaaatagcaagtt

SEQ ID NO: 285 - DNA, 41 bp, Artificial Sequence
  Description of Artificial Sequence: Synthetic primer
  Category: primer
  Description: Amplify ABE8.17m_sgRNA spacer 2
ctcatccgccacatatcctgctatagtgagtcgtattagga

SEQ ID NO: 286 - DNA, 45 bp, Artificial Sequence
  Description of Artificial Sequence: Synthetic primer
  Category: primer
  Description: Amplify ABE8.17m_sgRNA spacer 2
caggatatgtggcggatgaggttttagagctagaaatagcaagtt

SEQ ID NO: 287 - DNA, 41 bp, Artificial Sequence
  Description of Artificial Sequence: Synthetic primer
  Category: primer
  Description: Amplify ABE8.17m_sgRNA spacer 3
atcgcgtgggcgtattcgcactatagtgagtcgtattagga

SEQ ID NO: 288 - DNA, 45 bp, Artificial Sequence
  Description of Artificial Sequence: Synthetic primer
  Category: primer
  Description: Amplify ABE8.17m_sgRNA spacer 3
tgcgaatacgcccacgcgatgttttagagctagaaatagcaagtt

SEQ ID NO: 289 - DNA, 50 bp, Artificial Sequence
  Description of Artificial Sequence: Synthetic primer
  Category: primer
  Description: Amplify MGC1-4_spacer 1
caaaacttgcaccacagatgaaacgccgctatagtgagtcgtattaaggt

SEQ ID NO: 290 - DNA, 50 bp, Artificial Sequence
  Description of Artificial Sequence: Synthetic primer
  Category: primer
  Description: Amplify MGC1-4_spacer 1
tatagcggcgtttcatctgtggtgcaagttttgatttactcgaaagagtc

SEQ ID NO: 291 - DNA, 50 bp, Artificial Sequence
  Description of Artificial Sequence: Synthetic primer
  Category: primer
  Description: Amplify MGC1-4_spacer 2
caaaacgacggcaaacgactgtcctggcctatagtgagtcgtattaaggt

SEQ ID NO: 292 - DNA, 50 bp, Artificial Sequence
  Description of Artificial Sequence: Synthetic primer
  Category: primer
  Description: Amplify MGC1-4_spacer 2
tataggccaggacagtcgtttgccgtcgttttgatttactcgaaagagtc

SEQ ID NO: 293 - DNA, 50 bp, Artificial Sequence
  Description of Artificial Sequence: Synthetic primer
  Category: primer
  Description: Amplify MGC1-4_spacer 3
caaaacgcctccagtacagcgcggctgactatagtgagtcgtattaaggt

SEQ ID NO: 294 - DNA, 50 bp, Artificial Sequence
  Description of Artificial Sequence: Synthetic primer
  Category: primer
  Description: Amplify MGC1-4_spacer 3
tatagtcagccgcgctgtactggaggcgttttgatttactcgaaagagtc

SEQ ID NO: 295 - DNA, 50 bp, Artificial Sequence
  Description of Artificial Sequence: Synthetic primer
  Category: primer
  Description: Amplify MGC1-6_spacer 1
caaaacgctgcgcaactgttgggaagggctatagtgagtcgtattaaggt

SEQ ID NO: 296 - DNA, 50 bp, Artificial Sequence
  Description of Artificial Sequence: Synthetic primer
  Category: primer
  Description: Amplify MGC1-6_spacer 1
tagcccttcccaacagttgcgcagcgttttgacttgaaaaagtcttaact

SEQ ID NO: 297 - DNA, 50 bp, Artificial Sequence
  Description of Artificial Sequence: Synthetic primer
  Category: primer
  Description: Amplify MGC1-6_spacer 2
caaaaccagtttgaggggacgacgacagctatagtgagtcgtattaaggt

SEQ ID NO: 298 - DNA, 50 bp, Artificial Sequence
  Description of Artificial Sequence: Synthetic primer
  Category: primer
  Description: Amplify MGC1-6_spacer 2
tagctgtcgtcgtcccctcaaactggttttgacttgaaaaagtcttaact

SEQ ID NO: 299 - DNA, 50 bp, Artificial Sequence
  Description of Artificial Sequence: Synthetic primer
  Category: primer
  Description: Amplify MGC1-6_spacer 3
caaaacggttttcgacgttcagacgtagctatagtgagtcgtattaaggt

SEQ ID NO: 300 - DNA, 50 bp, Artificial Sequence
  Description of Artificial Sequence: Synthetic primer
  Category: primer
  Description: Amplify MGC1-6_spacer 3
tagctacgtctgaacgtcgaaaaccgttttgacttgaaaaagtcttaact

SEQ ID NO: 301 - DNA, 50 bp, Artificial Sequence
  Description of Artificial Sequence: Synthetic primer
  Category: primer
  Description: Amplify MGC3-6_spacer 1
ctcaactcttccagataactgccgtcacctatagtgagtcgtattaaggt

SEQ ID NO: 302 - DNA, 50 bp, Artificial Sequence
  Description of Artificial Sequence: Synthetic primer
  Category: primer
  Description: Amplify MGC3-6_spacer 1
aggtgacggcagttatctggaagagttgagaatcgaaagattcttaataa

SEQ ID NO: 303 - DNA, 50 bp, Artificial Sequence
  Description of Artificial Sequence: Synthetic primer
  Category: primer
  Description: Amplify MGC3-6_spacer 2
tcaacagtacagcgcggctgaaatcatctatagtgagtcgtattaaggtc

SEQ ID NO: 304 - DNA, 50 bp, Artificial Sequence
  Description of Artificial Sequence: Synthetic primer
  Category: primer
  Description: Amplify MGC3-6_spacer 2
agatgatttcagccgcgctgtactgttgagaatcgaaagattcttaataa

SEQ ID NO: 305 - DNA, 50 bp, Artificial Sequence
  Description of Artificial Sequence: Synthetic primer
  Category: primer
  Description: Amplify MGC3-6_spacer 3
ctcaaccggtcaaaacaggcggcagtaactatagtgagtcgtattaaggt

SEQ ID NO: 306 - DNA, 50 bp, Artificial Sequence
  Description of Artificial Sequence: Synthetic primer
  Category: primer
  Description: Amplify MGC3-6_spacer 3
tagttactgccgcctgttttgaccggttgagaatcgaaagattcttaata

SEQ ID NO: 307 - DNA, 50 bp, Artificial Sequence
  Description of Artificial Sequence: Synthetic primer
  Category: primer
  Description: Amplify MGC3-7_spacer 1
cccaacaaaccaggcaaagcgccattcgctatagtgagtcgtattaaggt

SEQ ID NO: 308 - DNA, 49 bp, Artificial Sequence
  Description of Artificial Sequence: Synthetic primer
  Category: primer
  Description: Amplify MGC3-7_spacer 1
cactatagcgaatggcgctttgcctggtttgttgggaaccgaaaggttc

SEQ ID NO: 309 - DNA, 50 bp, Artificial Sequence
  Description of Artificial Sequence: Synthetic primer
  Category: primer
  Description: Amplify MGC3-7_spacer 2
cccaactgcatctgccagtttgaggggactatagtgagtcgtattaaggt

SEQ ID NO: 310 - DNA, 49 bp, Artificial Sequence
  Description of Artificial Sequence: Synthetic primer
  Category: primer
  Description: Amplify MGC3-7_spacer 2
cactatagtcccctcaaactggcagatgcagttgggaaccgaaaggttc

SEQ ID NO: 311 - DNA, 50 bp, Artificial Sequence
  Description of Artificial Sequence: Synthetic primer
  Category: primer
  Description: Amplify MGC3-7_spacer 3
cccaacgataggtcacgttggtgtagatctatagtgagtcgtattaaggt

SEQ ID NO: 312 - DNA, 49 bp, Artificial Sequence
  Description of Artificial Sequence: Synthetic primer
  Category: primer
  Description: Amplify MGC3-7_spacer 3
cactatagatctacaccaacgtgacctatcgttgggaaccgaaaggttc

SEQ ID NO: 313 - DNA, 50 bp, Artificial Sequence
  Description of Artificial Sequence: Synthetic primer
  Category: primer
  Description: Amplify MGC4-5_spacer 1
cacagcgtaaccgacccagcgcccgttgctatagtgagtcgtattaaggt

SEQ ID NO: 314 - DNA, 48 bp, Artificial Sequence
  Description of Artificial Sequence: Synthetic primer
  Category: primer
  Description: Amplify MGC4-5_spacer 1
cactatagcaacgggcgctgggtcggttacgctgtggcttgcggggga

SEQ ID NO: 315 - DNA, 50 bp, Artificial Sequence; identical to SEQ ID NO: 259
  Description of Artificial Sequence: Synthetic primer
  Category: primer
  Description: Amplify MGC4-5_spacer 2

SEQ ID NO: 316 - DNA, 48 bp, Artificial Sequence; identical to SEQ ID NO: 260
  Description of Artificial Sequence: Synthetic primer
  Category: primer
  Description: Amplify MGC4-5_spacer 2

SEQ ID NO: 317 - DNA, 50 bp, Artificial Sequence
  Description of Artificial Sequence: Synthetic primer
  Category: primer
  Description: Amplify MGC4-5_spacer 3
cacagcgtggtgtcggctccgccgccttctatagtgagtcgtattaaggt

SEQ ID NO: 318 - DNA, 48 bp, Artificial Sequence
  Description of Artificial Sequence: Synthetic primer
  Category: primer
  Description: Amplify MGC4-5_spacer 3
cactatagaaggcggcggagccgacaccacgctgtggcttgcggggga

SEQ ID NO: 319 - DNA, 50 bp, Artificial Sequence
  Description of Artificial Sequence: Synthetic primer
  Category: primer
  Description: Amplify MGC14-1_spacer 1
caagacggaacaaacggcggattgaccgctatagtgagtcgtattaaggt

SEQ ID NO: 320 - DNA, 48 bp, Artificial Sequence
  Description of Artificial Sequence: Synthetic primer
  Category: primer
  Description: Amplify MGC14-1_spacer 1
cactatagcggtcaatccgccgtttgttccgtcttgagcgaaagctcc

SEQ ID NO: 321 - DNA, 50 bp, Artificial Sequence
  Description of Artificial Sequence: Synthetic primer
  Category: primer
  Description: Amplify MGC14-1_spacer 2
caagacgcgtgggcgtattcgcaaaggactatagtgagtcgtattaaggt

SEQ ID NO: 322 - DNA, 48 bp, Artificial Sequence
  Description of Artificial Sequence: Synthetic primer
  Category: primer
  Description: Amplify MGC14-1_spacer 2
cactatagtcctttgcgaatacgcccacgcgtcttgagcgaaagctcc

SEQ ID NO: 323 - DNA, 50 bp, Artificial Sequence
  Description of Artificial Sequence: Synthetic primer
  Category: primer
  Description: Amplify MGC14-1_spacer 3
caagacaaatcaccgccgtaagccgaccctatagtgagtcgtattaaggt

SEQ ID NO: 324 - DNA, 48 bp, Artificial Sequence
  Description of Artificial Sequence: Synthetic primer
  Category: primer
  Description: Amplify MGC14-1_spacer 3
cactatagggtcggcttacggcggtgatttgtcttgagcgaaagctcc

SEQ ID NO: 325 - DNA, 50 bp, Artificial Sequence
  Description of Artificial Sequence: Synthetic primer
  Category: primer
  Description: Amplify MGC15-1_spacer 1
tacaacgacgtagtgtgacgcgatcggcctatagtgagtcgtattaaggt

SEQ ID NO: 326 - DNA, 50 bp, Artificial Sequence
  Description of Artificial Sequence: Synthetic primer
  Category: primer
  Description: Amplify MGC15-1_spacer 1
ataggccgatcgcgtcacactacgtcgttgtaattccctagaaataggtt

SEQ ID NO: 327 - DNA, 50 bp, Artificial Sequence
  Description of Artificial Sequence: Synthetic primer
  Category: primer
  Description: Amplify MGC15-1_spacer 2
tacaactcgccggtagccagcgcggatcctatagtgagtcgtattaaggt

SEQ ID NO: 328 - DNA, 50 bp, Artificial Sequence
  Description of Artificial Sequence: Synthetic primer
  Category: primer
  Description: Amplify MGC15-1_spacer 2
ataggatccgcgctggctaccggcgagttgtaattccctagaaataggtt

SEQ ID NO: 329 - DNA, 50 bp, Artificial Sequence
  Description of Artificial Sequence: Synthetic primer
  Category: primer
  Description: Amplify MGC15-1_spacer 3
tacaaccatactgcaccgggcgggaaggctatagtgagtcgtattaaggt

SEQ ID NO: 330 - DNA, 50 bp, Artificial Sequence
  Description of Artificial Sequence: Synthetic primer
  Category: primer
  Description: Amplify MGC15-1_spacer 3
atagccttcccgcccggtgcagtatggttgtaattccctagaaataggtt

SEQ ID NO: 331 - DNA, 50 bp, Artificial Sequence
  Description of Artificial Sequence: Synthetic primer
  Category: primer
  Description: Amplify MGC18-1_spacer 1
tcaaacgcctccagtacagcgcggctgactatagtgagtcgtattaaggt

SEQ ID NO: 332 - DNA, 50 bp, Artificial Sequence
  Description of Artificial Sequence: Synthetic primer
  Category: primer
  Description: Amplify MGC18-1_spacer 1
ctatagtcagccgcgctgtactggaggcgtttgagagtagtgaaaactac

SEQ ID NO: 333 - DNA, 50 bp, Artificial Sequence
  Description of Artificial Sequence: Synthetic primer
  Category: primer
  Description: Amplify MGC18-1_spacer 2
tcaaacgcacagccgggaagggctggtcctatagtgagtcgtattaaggt

SEQ ID NO: 334 - DNA, 50 bp, Artificial Sequence
  Description of Artificial Sequence: Synthetic primer
  Category: primer
  Description: Amplify MGC18-1_spacer 2
ctataggaccagcccttcccggctgtgcgtttgagagtagtgaaaactac

SEQ ID NO: 335 - DNA, 50 bp, Artificial Sequence
  Description of Artificial Sequence: Synthetic primer
  Category: primer
  Description: Amplify MGC18-1_spacer 3
tcaaacatggtttgcccggataaacggactatagtgagtcgtattaaggt

SEQ ID NO: 336 - DNA, 50 bp, Artificial Sequence
  Description of Artificial Sequence: Synthetic primer
  Category: primer
  Description: Amplify MGC18-1_spacer 3
ctatagtccgtttatccgggcaaaccatgtttgagagtagtgaaaactac

SEQ ID NO: 337 - DNA, 41 bp, Artificial Sequence
  Description of Artificial Sequence: Synthetic primer
  Category: primer
  Description: Amplify BE3_sgRNA spacer 1
tgtggagcgacatccagaggctatagtgagtcgtattagga

SEQ ID NO: 338 - DNA, 45 bp, Artificial Sequence
  Description of Artificial Sequence: Synthetic primer
  Category: primer
  Description: Amplify BE3_sgRNA spacer 1
cctctggatgtcgctccacagttttagagctagaaatagcaagtt

SEQ ID NO: 339 - DNA, 41 bp, Artificial Sequence
  Description of Artificial Sequence: Synthetic primer
  Category: primer
  Description: Amplify BE3_sgRNA spacer 2
taattcaattcgcgcgtcccctatagtgagtcgtattagga

SEQ ID NO: 340 - DNA, 45 bp, Artificial Sequence
  Description of Artificial Sequence: Synthetic primer
  Category: primer
  Description: Amplify BE3_sgRNA spacer 2
gggacgcgcgaattgaattagttttagagctagaaatagcaagtt

SEQ ID NO: 341 - DNA, 41 bp, Artificial Sequence
  Description of Artificial Sequence: Synthetic primer
  Category: primer
  Description: Amplify BE3_sgRNA spacer 3
agtcacgacgttgtaaaacgctatagtgagtcgtattagga

SEQ ID NO: 342 - DNA, 45 bp, Artificial Sequence
  Description of Artificial Sequence: Synthetic primer
  Category: primer
  Description: Amplify BE3_sgRNA spacer 3
cgttttacaacgtcgtgactgttttagagctagaaatagcaagtt

SEQ ID NO: 343 - DNA, 25 bp, Artificial Sequence
  Description of Artificial Sequence: Synthetic primer
  Category: primer
  Description: For lacZ sequencing
cgaacatccaaaagtttgtgttttt

SEQ ID NO: 344 - DNA, 19 bp, Artificial Sequence
  Description of Artificial Sequence: Synthetic primer
  Category: primer
  Description: For lacZ sequencing
tgagcgcatttttacgcgc

SEQ ID NO: 345 - DNA, 18 bp, Artificial Sequence
  Description of Artificial Sequence: Synthetic primer
  Category: primer
  Description: For lacZ sequencing
gaaaacggcaacccgtgg

SEQ ID NO: 346 - DNA, 50 bp, Artificial Sequence
  Description of Artificial Sequence: Synthetic primer
  Category: primer
  Description: Amplify sgRNA expression cassette
ccgccgccgcaaggaatggtttaattaattacggccagtcatgcataatc

SEQ ID NO: 347 - DNA, 50 bp, Artificial Sequence
  Description of Artificial Sequence: Synthetic primer
  Category: primer
  Description: Amplify sgRNA expression cassette
gactgttgggcgccatctccttgcatgctcactgagcctccacctagcct

SEQ ID NO: 348 - DNA, 50 bp, Artificial Sequence
  Description of Artificial Sequence: Synthetic primer
  Category: primer
  Description: Amplify MGA3-8_sgRNA spacer 1
ctcaaccgcccgttgcaccacagatgaactatagtgagtcgtattaaggt

SEQ ID NO: 349 - DNA, 50 bp, Artificial Sequence
  Description of Artificial Sequence: Synthetic primer
  Category: primer
  Description: Amplify MGA3-8_sgRNA spacer 1
tatagttcatctgtggtgcaacgggcggttgagaatctttcgaaagaaag

SEQ ID NO: 350 - DNA, 50 bp, Artificial Sequence
  Description of Artificial Sequence: Synthetic primer
  Category: primer
  Description: Amplify MGA3-8_sgRNA spacer 2
ctcaacccatgcagaggatgatgctcgtctatagtgagtcgtattaaggt

SEQ ID NO: 351 - DNA, 50 bp, Artificial Sequence
  Description of Artificial Sequence: Synthetic primer
  Category: primer
  Description: Amplify MGA3-8_sgRNA spacer 2
atagacgagcatcatcctctgcatgggttgagaatctttcgaaagaaaga

SEQ ID NO: 352 - DNA, 50 bp, Artificial Sequence
  Description of Artificial Sequence: Synthetic primer
  Category: primer
  Description: Amplify MGA3-8_sgRNA spacer 3
ctcaacgcgttagggtcaatgcgggtcgctatagtgagtcgtattaaggt

SEQ ID NO: 353 - DNA, 50 bp, Artificial Sequence
  Description of Artificial Sequence: Synthetic primer
  Category: primer
  Description: Amplify MGA3-8_sgRNA spacer 3
tatagcgacccgcattgaccctaacgcgttgagaatctttcgaaagaaag

SEQ ID NO: 354 - DNA, 50 bp, Artificial Sequence; identical to SEQ ID NO: 348
  Description of Artificial Sequence: Synthetic primer
  Category: primer
  Description: Amplify MGC3-8_sgRNA spacer 1

SEQ ID NO: 355 - DNA, 50 bp, Artificial Sequence; identical to SEQ ID NO: 349
  Description of Artificial Sequence: Synthetic primer
  Category: primer
  Description: Amplify MGC3-8_sgRNA spacer 1

SEQ ID NO: 356 - DNA, 50 bp, Artificial Sequence; identical to SEQ ID NO: 350
  Description of Artificial Sequence: Synthetic primer
  Category: primer
  Description: Amplify MGC3-8_sgRNA spacer 2

SEQ ID NO: 357 - DNA, 50 bp, Artificial Sequence; identical to SEQ ID NO: 351
  Description of Artificial Sequence: Synthetic primer
  Category: primer
  Description: Amplify MGC3-8_sgRNA spacer 2

SEQ ID NO: 358 - DNA, 50 bp, Artificial Sequence; identical to SEQ ID NO: 352
  Description of Artificial Sequence: Synthetic primer
  Category: primer
  Description: Amplify MGC3-8_sgRNA spacer 3

SEQ ID NO: 359 - DNA, 50 bp, Artificial Sequence; identical to SEQ ID NO: 353
  Description of Artificial Sequence: Synthetic primer
  Category: primer
  Description: Amplify MGC3-8_sgRNA spacer 3

SEQ ID NO: 360 - DNA, 4 bp, Artificial Sequence
  Description of Artificial Sequence: Synthetic oligonucleotide
  Category: PAM
  Description: nMG1-4 (D9A) nickase PAM
  modified_base (1)..(1): a, c, t, g, unknown or other
nrrr

SEQ ID NO: 361 - DNA, 6 bp, Artificial Sequence
  Description of Artificial Sequence: Synthetic oligonucleotide
  Category: PAM
  Description: nMG1-6 (D13A) nickase PAM
  modified_base (1)..(2): a, c, t, g, unknown or other
nnrray

SEQ ID NO: 362 - DNA, 7 bp, Artificial Sequence
  Description of Artificial Sequence: Synthetic oligonucleotide
  Category: PAM
  Description: nMG3-6 (D13A) nickase PAM
  modified_base (1)..(2): a, c, t, g, unknown or other
  modified_base (6)..(6): a, c, t, g, unknown or other
nnrggnt

SEQ ID NO: 363 - DNA, 7 bp, Artificial Sequence
  Description of Artificial Sequence: Synthetic oligonucleotide
  Category: PAM
  Description: nMG3-7 (D12A) nickase PAM
  modified_base (1)..(2): a, c, t, g, unknown or other
  modified_base (4)..(4): a, c, t, g, unknown or other
nnrnyay

SEQ ID NO: 364 - DNA, 7 bp, Artificial Sequence
  Description of Artificial Sequence: Synthetic oligonucleotide
  Category: PAM
  Description: nMG3-8 (D13A) nickase PAM
  modified_base (1)..(2): a, c, t, g, unknown or other
nnrggty

SEQ ID NO: 365 - DNA, 5 bp, Artificial Sequence
  Description of Artificial Sequence: Synthetic oligonucleotide
  Category: PAM
  Description: nMG4-5 (D17A) nickase PAM
  modified_base (1)..(1): a, c, t, g, unknown or other
nrccv

SEQ ID NO: 366 - DNA, 8 bp, Artificial Sequence
  Description of Artificial Sequence: Synthetic oligonucleotide
  Category: PAM
  Description: nMG14-1 (D23A) nickase PAM
  modified_base (1)..(1): a, c, t, g, unknown or other
  modified_base (3)..(4): a, c, t, g, unknown or other
nrnngrka

SEQ ID NO: 367 - DNA, 5 bp, Artificial Sequence
  Description of Artificial Sequence: Synthetic oligonucleotide
  Category: PAM
  Description: nMG15-1 (D8A) nickase PAM
  modified_base (1)..(4): a, c, t, g, unknown or other
nnnnc

SEQ ID NO: 368 - DNA, 6 bp, Artificial Sequence
  Description of Artificial Sequence: Synthetic oligonucleotide
  Category: PAM
  Description: nMG18-1 (D12A) nickase PAM
  modified_base (1)..(1): a, c, t, g, unknown or other
nrwart

SEQ ID NO: 369 - protein, 7 aa, Artificial Sequence
  Description of Artificial Sequence: Synthetic peptide
  Category: NLS
  Description: SV40
PKKKRKV

SEQ ID NO: 370 - protein, 16 aa, Unknown
  Description of Unknown: nucleoplasmin bipartite NLS sequence
  Category: NLS
  Description: nucleoplasmin bipartite NLS
KRPAATKKAGQAKKKK

SEQ ID NO: 371 - protein, 9 aa, Unknown
  Description of Unknown: c-myc NLS sequence
  Category: NLS
  Description: c-myc NLS
PAAKRVKLD

SEQ ID NO: 372 - protein, 11 aa, Unknown
  Description of Unknown: c-myc NLS sequence
  Category: NLS
  Description: c-myc NLS
RQRRNELKRSP

SEQ ID NO: 373 - protein, 38 aa, Homo sapiens
  Category: NLS
  Description: hRNPA1 M9 NLS
NQSSNFGPMKGGNFGGRSSGPYGGGGQYFAKPRNQGGY

SEQ ID NO: 374 - protein, 42 aa, Unknown
  Description of Unknown: Importin-alpha IBB domain sequence
  Category: NLS
  Description: Importin-alpha IBB domain
RMRIZFKNKGKDTAELRRRRVEVSVELRKAKKDEQILKRRNV

SEQ ID NO: 375 - protein, 8 aa, Unknown
  Description of Unknown: Myoma T protein sequence
  Category: NLS
  Description: Myoma T protein
VSRKRPRP

SEQ ID NO: 376 - protein, 8 aa, Unknown
  Description of Unknown: Myoma T protein sequence
  Category: NLS
  Description: Myoma T protein
PPKKARED

SEQ ID NO: 377 - protein, 8 aa, Unknown
  Description of Unknown: p53 sequence
  Category: NLS
  Description: p53
PQPKKKPL

SEQ ID NO: 378 - protein, 12 aa, Mus sp.
  Category: NLS
  Description: mouse c-abl IV
SALIKKKKKMAP

SEQ ID NO: 379 - protein, 5 aa, Influenza virus
  Category: NLS
  Description: influenza virus NS1
DRLRR

SEQ ID NO: 380 - protein, 7 aa, Influenza virus
  Category: NLS
  Description: influenza virus NS1
PKQKKRK

SEQ ID NO: 381 - protein, 10 aa, Hepatitis delta virus
  Category: NLS
  Description: Hepatitis virus delta antigen
RKLKKKIKKL

SEQ ID NO: 382 - protein, 10 aa, Mus sp.
  Category: NLS
  Description: mouse Mx1 protein
REKKKFLKRR

SEQ ID NO: 383 - protein, 20 aa, Homo sapiens
  Category: NLS
  Description: human poly(ADP-ribose) polymerase
KRKGDEVDGVDEVAKKKSKK

SEQ ID NO: 384 - protein, 17 aa, Homo sapiens
  Category: NLS
  Description: steroid hormone receptor (human) glucocorticoid
RKCLQAGMNLEARKTKK

SEQ ID NO: 385 - protein, 170 aa, Unknown
  Description of Unknown: uncultivated organism
  Category: MG68 putative adenosine deaminase (TadA-like)
  Description: MG68-3 deaminase
MNEQTSTDEQFMQQALALADEAERQGEVPVGALLVHQGTVIGRGFNQVITQLDPSAHAEMLAIRDAARYLQNYRILDTTLYVTLEPCPMCAGALVHARVKRLVYGASDPRTGACGSVFNVVADTRLNHQLEVVAGVLGSQCGERLSAFFRQRRAAQKALKKAAQNFQSPS

SEQ ID NO: 386 - protein, 167 aa, Unknown
  Description of Unknown: uncultivated organism
  Category: MG68 putative adenosine deaminase (TadA-like)
  Description: MG68-4 deaminase
MTDSQNDTDEYWMGEALKLAQKAWDEGEVPVGAILVRKGEVIGHGWNRSIGSHDPSAHAEIMAIREAGVRIGNYRMLDTVLYVTLEPCAMCAGALVHGRISRLVFGAEDPKTGACGSVMDIARHPALNHQLQVDGGVMAAPCARLLSDFFRWRRAQKKAARDNSSGN

SEQ ID NO: 387 - protein, 173 aa, Unknown
  Description of Unknown: uncultivated organism
  Category: MG68 putative adenosine deaminase (TadA-like)
  Description: MG68-5 deaminase
MSTDFTSAAQQELDIAYMRKAIALAAQAEADGEVPVGAVLVHNNEIIGVGRNRVIGGCDPSLHAEFEAIRQGAQEIGNYRLLETTLYVTLEPCPMCAGLLVHSRIGRLVYGTPDLKTGAAGSLMNLLQHPELNHQIAITSGVLQADCAAQLSGFFSAQRERKKALKKRLKPNL

SEQ ID NO: 388 - protein, 182 aa, Unknown
  Description of Unknown: uncultivated organism
  Category: MG68 putative adenosine deaminase (TadA-like)
  Description: MG68-6 deaminase
MSEIPQVVTEQQTDERWMHYALALADKAEQAGEIPVGAVLVKDNQVIGEGWNMSICRHDPSAHAEMLAIREAAVRVQNYRLLDTTLYVTLEPCAMCAGLLVHSRVKRLVFGAFDAKTGAAGSVTDLVRHPVLNHQLEVTSGVLAEQCADKLSSFFRRRRQEHKAAKALRQAQDPENQGNSES

SEQ ID NO: 389 - protein, 151 aa, Unknown
  Description of Unknown: uncultivated organism
  Category: MG68 putative adenosine deaminase (TadA-like)
  Description: MG68-7 deaminase
MSDEIWIKHALTLADKAYQQGEVPVGAVLVKNNQIIAEGWNQPIAHHDPSAHAEIMALRLAGQAEQNYRLPETTLYVTLEPCVMCAGAMIHARIGRLVFGAYDPKTGAAGSVFDIFSDARHNHQIEVVSGVLSELCGDKLRAFFRERRKKR

SEQ ID NO: 390 - protein, 166 aa, Unknown
  Description of Unknown: uncultivated organism
  Category: MG68 putative adenosine deaminase (TadA-like)
  Description: MG68-8 deaminase
MPQSEQDIYWIRYAMQLAERAEQAGEVPVGAVLVLDNQALGEGWNLSISRHDPCAHAEIMAIRQAGERIGNYRLLGATLYVTLEPCVMCAGAMVHSRIARVVYGASDLKTGAAGSVFDVLSDPRHNHVVEITGGVESEACSQQLSDFFRRRRAEQKAEKQRLKDNQ

SEQ ID NO: 391 - protein, 168 aa, Unknown
  Description of Unknown: uncultivated organism
  Category: MG68 putative adenosine deaminase (TadA-like)
  Description: MG68-9 deaminase
MNVAADEQWMKEALRQAERALLAGEVPVGAVVVSQNNIVGQGFNRNLLDRDPTAHAEIIALREAAANIGNHRLLDCELYATIEPCAMCAGAITHARVRRLVYGAEDLKAGAVHSVMQVVNHPALNHRVEVKGGVLAERCGELLQQFFWARRAEQSGISGANEDQLRRG

SEQ ID NO: 392 - protein, 143 aa, Unknown
  Description of Unknown: uncultivated organism
  Category: MG68 putative adenosine deaminase (TadA-like)
  Description: MG68-10 deaminase
MLLAMEQARAAEEAGEVPVGAVILSPEGEVVARGENRVLRDSDPTAHAEMVALRAAGRVLGNYRLPGCTLYSTLEPCSMCSGAILHARVARLVFAASDPKAGACGSVLEVMNHPRLNHQVELVGGVLALECGQMLTEFFRARR

SEQ ID NO: 393 - protein, 210 aa, Unknown
  Description of Unknown: uncultivated organism
  Category: MG68 putative adenosine deaminase (TadA-like)
  Description: MG68-11 deaminase
MSAEIDLTDKAFMRQALDQAQNAWLLGEVPVGAVIVREGRVIATGYNRPIGDNDPTAHAEIVALRQAASLLGNYRLPGCTLYVTLEPCAMCAMALMHARLDRVVFGAPDPKTGAAGSVINLFDEPRLNHHCALRGGVEAQDCARLLQDFFRERRRQIQALQQKPAIPADRADPDEQHASLHAEGPAPLAGIDVRHLDEPDAAATSNPESP

SEQ ID NO: 394 - protein, 159 aa, Unknown
  Description of Unknown: uncultivated organism
  Category: MG68 putative adenosine deaminase (TadA-like)
  Description: MG68-12 deaminase
MEIKARMRDIMTDDERWMAKALRLAKEGAQAGEVPVGAILVFSGEQLAAAYNSPIRLRDATAHAEILALRLGGERLQNYRLTGCTLYVTLEPCAMCAGALVQARIARLVFGARDSRVGAAGSALDLAREPRFNHQVTVVGGVLASECEQVLREFFRARR

SEQ ID NO: 395 - protein, 205 aa, Unknown
  Description of Unknown: uncultivated organism
  Category: MG68 putative adenosine deaminase (TadA-like)
  Description: MG68-13 deaminase
MPEPFQGGDPADPARAAAEAQDLADRAFMRLALDQAHNAWLLGEVPVGAVIVHEGRVLATGYNRPIGDSDPTAHAEIVALRQAASLLGNYRLPGCTLYVTLEPCAMCAMALLHARIERVVFGASDPKTGAAGSVLDLFAQPLLNHHASLRAGVEAQACGALLQEFFRERRARARAQQQLPAHGGGIDVRHLDAPEPGDESDPFDE

SEQ ID NO: 396 - protein, 159 aa, Unknown
  Description of Unknown: uncultivated organism
  Category: MG68 putative adenosine deaminase (TadA-like)
  Description: MG68-14 deaminase
MGSDQDFMRLALLEAEKAGAIGEVPVGAVIVKDGKVVARGHNQPVSGHDPTAHAEIMALREAGQVLGNYRLPACDLYVTLEPCAMCIGAMIHARIRRVIFGAHDPKTGAAGSVINLFEEKTLNHHATVTGGILASDCAQLLKAFFAMRRKEAKTPSLSG

SEQ ID NO: 397 - protein, 168 aa, Unknown
  Description of Unknown: uncultivated organism
  Category: MG68 putative adenosine deaminase (TadA-like)
  Description: MG68-15 deaminase
MEPMEEHRHFMGLAIEEAARAYELNEVPVGAVLVGSAGEILSRASNAPIRSADPSAHAEMIALRQAARASGNYRLPGSVLYVTLEPCVMCVGAMLHARIATLVFGARDPRTGAAGSVVDLTSVPAFNHYVRVIAGVRAEECSELLRRFFRERRREGKSGYGGEVPKRP

SEQ ID NO: 398 - protein, 153 aa, Unknown
  Description of Unknown: uncultivated organism
  Category: MG68 putative adenosine deaminase (TadA-like)
  Description: MG68-16 deaminase
MADEDIKFMRLALELAKKAEFIDEVPVGALIIKDGEIIGTGMNSCISDHDPTSHAEIKAIRDAANTIKNYRLNGCSIYVTLEPCAMCVGAIQHARIEKIIYGANDPKTGACGSVIDLMSIKEINHHTEAIGGVLQKECGQILKDFFLSKRKKP

SEQ ID NO: 399 - protein, 148 aa, Unknown
  Description of Unknown: uncultivated organism
  Category: MG68 putative adenosine deaminase (TadA-like)
  Description: MG68-17 deaminase
MQRALGRAGDARAQGEVPVGAVVVCAGEVVGEGCNRNISLDDPSAHAEILALRAAGQRLGNYRLPGCTLYVTLEPCAMCVGAAIHSRLDGVVFGATDPKTGALGGAFDLPASHAHNHVLSVRGGLLADECGALLKAFFRDRRKAPRAP

SEQ ID NO: 400 - protein, 191 aa, Unknown
  Description of Unknown: uncultivated organism
  Category: MG68 putative adenosine deaminase (TadA-like)
  Description: MG68-18 deaminase
MQKKVDDFLKIVEPPDAERRTKGKLLQQRAVDEQWMGLALQRGEEAGRQGEVPVGAVVVGKDGFLTAAGNSPIGLADPSAHAEMLAIRAAAKLLGNYRLPEATLYVTLEPCIMCMGALIQARISRLVFGAADPKTGAAISVYAIGTDQRLNHTVAVTGGILAEACAQLLKNFFKKRRGHSPVINSPFLKTP

SEQ ID NO: 401 - protein, 144 aa, Unknown
  Description of Unknown: uncultivated organism
  Category: MG68 putative adenosine deaminase (TadA-like)
  Description: MG68-19 deaminase
MREAYALALIAYEQGEVPVGAVLVGEDDEILGRGWNQVIQRHDPMAHAECVAIQEAAAQLRNYRLNGSTLYVTLEPCCMCAGAMVHARIARLVFGARDVRSGAAGSAYNLLAGDLLNHRVKIDEGILQQECSHLLRNFFKQRRD

SEQ ID NO: 402 - protein, 195 aa, Unknown
  Description of Unknown: uncultivated organism
  Category: MG68 putative adenosine deaminase (TadA-like)
  Description: MG68-20 deaminase
MTSQVSRQQPLSGNNLVHNDLIASVCPPGLVPAQQDEFWMQQALVLARQAEMMGEVPVGAVVVKNQQLIGYGYNQSITLNDPSAHAEVLALRMAGQTLTNYRLPDTTLYVTLEPCAMCATTMVHARVARLVYGAADLKTGAAGSVLNLTNYTAFNHQLSCVSGVLQRDCSYLLSNFFKLRRTQHKAKKVSGTFIR

SEQ ID NO: 403 - protein, 162 aa, Unknown
  Description of Unknown: uncultivated organism
  Category: MG68 putative adenosine deaminase (TadA-like)
  Description: MG68-21 deaminase
MDHERYMRRAIELAQQAESLGEVPVGAVIVHDHQIIGEGFNEVIRRNDPSAHAEAQAIRAAGQHLANYRLVNTTLYVSLEPCAMCAGLIVHARVKTVVFATPDPRTGATGTAIQVLNHPSMNHHVEVVSGVLQEQSATILQNFFRKKRELAKMKKFHEKRVN

SEQ ID NO: 404 - protein, 166 aa, Unknown
  Description of Unknown: uncultivated organism
  Category: MG68 putative adenosine deaminase (TadA-like)
  Description: MG68-22 deaminase
MSDEHFMRLALAQAALAEAEGEIPVGAVVVLNGEVVGSGYNSPIGRHDPTAHAEIRALRAAAATLGNYRLVGCELFVTLEPCLMCAGAIQHARIARLVYGAADYKTGVCGSTLDVFGELPGSPVPRLNHHTQVTGGVLGDECSRQLSAFFARRRAEKNAAKNHVFQ

SEQ ID NO: 405 - protein, 161 aa, Unknown
  Description of Unknown: uncultivated organism
  Category: MG68 putative adenosine deaminase (TadA-like)
  Description: MG68-23 deaminase
MDSLVERHEHYMMLALRLAEKGADRGEVPVGAVVVSPKGQILSLAHNEPIDLHDPTGHAEIIAIRKAAQRIGNYRLVGCSLYVTLEPCVMCYGAIIHARIKRLFFGAYDPKAGAGTVFGLFSSPFFNHQPEVRGGILAELCEKVLKEFFEKLRSSKCCSSG

SEQ ID NO: 406 - protein, 152 aa, Unknown
  Description of Unknown: uncultivated organism
  Category: MG68 putative adenosine deaminase (TadA-like)
  Description: MG68-24 deaminase
MTEDERWMEEALALAREASNDGEAPVGAVVVHAGEIIGRGRNRIEGLADPTAHAELLALRQASMNLGRWRLTGCALFVTLEPCAMCLGACYAARVDRLVYGATSPKFGAAGSSVTLAGVERLNHRLEVVSGVLEKECARLLAKFFRGLRGKG

SEQ ID NO: 407 - protein, 168 aa, Unknown
  Description of Unknown: uncultivated organism
  Category: MG68 putative adenosine deaminase (TadA-like)
  Description: MG68-25 deaminase
MDDQHWMGRALALAERAAEQGEVPGGAVLVIENEIVGEGWSRPIATQDPSAHAEILALRDAGLRRGNYRLSGSVLYVTLEPCVMCAGAIVHARVDTLVFGAADPKAGACGSVFDLLPSDGRFNHHTQCRGPILADACGTILRAFFANKRASPRARANASAAHERPEND

SEQ ID NO: 408 - protein, 173 aa, Unknown
  Description of Unknown: uncultivated organism
  Category: MG68 putative adenosine deaminase (TadA-like)
  Description: MG68-26 deaminase
MSESQFDETQYRWMDRALELAGQAANLGEVPVGAVIVSAEGELLGEGFNQPIKVQDPTAHAEIMAIRQACRKTGNYRLPGAVLYVTLEPCAMCAGAIVHARLARVVFATCEPKAGAVESTLRFFDLPQLNHRVEYTGGLRRSEASSLLSHFFQSRREEKALLKKNSRQQQSDC

SEQ ID NO: 409 - protein, 164 aa, Unknown
  Description of Unknown: uncultivated organism
  Category: MG68 putative adenosine deaminase (TadA-like)
  Description: MG68-27 deaminase
MREEKDLIFMKKALHLAEEAWRQGEVPVGAVVVDGEGQIIGQGYNQSIALLDPTAHAEIVALRQAAKKKKNYRLSGSTLYVTLEPCPMCLGAMVQARIDRLVFGAYDPKNGAVSSIMNFPLDKMNHRFEIEGGLLSQECATILKEFFQSRRGETNNKKETAKEE

SEQ ID NO: 410 - protein, 153 aa, Unknown
  Description of Unknown: uncultivated organism
  Category: MG68 putative adenosine deaminase (TadA-like)
  Description: MG68-28 deaminase
MDTDEQFMQHAIQLAHKAQSQGEVPVGAILVKDNKIIGKGWNQPITRHDPSAHAEIMAIRHAGQALKNYRLPDTTLYVTLEPCNMCAGMIIHARIKRLVFAAYDPKTGAAGSVFDTLTDPRNNHTVEIEGGVLEEPCAEMLRHFFRQRRKKTP

SEQ ID NO: 411 - protein, 158 aa, Unknown
  Description of Unknown: uncultivated organism
  Category: MG68 putative adenosine deaminase (TadA-like)
  Description: MG68-29 deaminase
MSELENNNPQHIKWMREAIKLAQKAQECGEVPVGALITKNDTLISSAYNQPITKHDPTAHAEIQALQQAGKILQNYRLNDTVLYITLEPCAMCAGAIVHARIGTVVFGAYDHKTGVAGSAGNIFTAEFSNHKPKIIGGTLEKECSLIIRNFFQARRQK

SEQ ID NO: 412 - protein, 182 aa, Unknown
  Description of Unknown: uncultivated organism
  Category: MG68 putative adenosine deaminase (TadA-like)
  Description: MG68-30 deaminase
MPNFLKQLQQIIAFETSCAADWSEQQKHVFWMQQALKVAAYGEQLGEVPVGAVAVVENQLIAVGWNASISKHDPTAHAEVMALRAAGTVLKNYRQLQLTLYVTLEPCAMCAGAMVHARIAQLVYGASDPKTGAVDSVFNLLRHPNLNHQAPVLGGVLATECRTQLQDFFRRRRQEKKQAQQK

SEQ ID NO: 413 - protein, 167 aa, Unknown
  Description of Unknown: uncultivated organism
  Category: MG68 putative adenosine deaminase (TadA-like)
  Description: MG68-31 deaminase
MESVDEQWMRYAIRLAQRAEEQGEVPVGAVLVKGDRCLAEGWNVPVQRHDPTAHAEMVAIRDAGIALENYRLIDSTLYVTLEPCVMCMGAIAHARIKRLVFGAFDPKRGAVCNALSLTDASFLNHKVVWDGGVFEQECSELLIDFFKARRKVTKPEVVVTNPQRHGM

SEQ ID NO: 414 - protein, 160 aa, Unknown
  Description of Unknown: uncultivated organism
  Category: MG68 putative adenosine deaminase (TadA-like)
  Description: MG68-32 deaminase
MYNQQAIDKHFMNCALELATFAADSGEVPVGAVIVRKNTIVAKGSNSPIADHDPTAHAEIIAIRKATAQCANYRTPDTTLYVTLEPCIMCMGAIIQARIGRLVFGAYDAKTGAAGSCYSIGQDNLLNHSLEIAGGINEQQCAILLKKFFKIRRKKGSKNN

SEQ ID NO: 415 - protein, 150 aa, Unknown
  Description of Unknown: uncultivated organism
  Category: MG68 putative adenosine deaminase (TadA-like)
  Description: MG68-33 deaminase
MSDLEWMRRAITLAQKAEQQGEVPVGALLVREGVCVGEGWNQPILRHDPSAHAEINALRDAGQATENYRLIDTVLYVTLEPCVMCMGAIANARVRRLVFGASDPARGAAGSILSLSNASFLNHHIETEGGLLAEECSELLRSFFARRRRK

SEQ ID NO: 416 - protein, 155 aa, Unknown
  Description of Unknown: uncultivated organism
  Category: MG68 putative adenosine deaminase (TadA-like)
  Description: MG68-34 deaminase
MSPVVAESDRAWMRHALELANRAGEEGEVPVGAVMVKDGQLVGEGWNRVIGLNDPSAHAEILALREAGQRLGNYRLPGCSLYVTLEPCAMCAGAMLHARLERVYFGTGDPKTGALGGTFDLFADYPHNHRIETQGGLLEIECSSLLKEFFRARRL

SEQ ID NO: 417 - protein, 194 aa, Unknown
  Description of Unknown: uncultivated organism
  Category: MG68 putative adenosine deaminase (TadA-like)
  Description: MG68-35 deaminase
MGLNGLTHHSPFIPISENIDTSDKLALQIMSLKLSNPDEKWMRHAQSLAEHAAAQGEIPVGAVIVQAGECIAEGWNQPIANNDPTAHAEIIALRKAAQYLNNYRLVNTLLYVTLEPCVMCAGAIIQARVKRVIFGAYDPKAGAAGSRFDILRDTRHNYQVECISGVLAKECSDYLSRFFKNRRTRAKPSRFPKP

SEQ ID NO: 418 - protein, 174 aa, Unknown
  Description of Unknown: uncultivated organism
  Category: MG68 putative adenosine deaminase (TadA-like)
  Description: MG68-36 deaminase
MQDDTVPEEIDHERWMRQALNEAMDAAEEGEVPVGAVVVYENRIIGRGHNRTVATHDPSAHAEILALGAAGAAVGDWRLTGVDIYVSLEPCAMCAGAIQLGRLRRAVFGPRDPKFGGCGSVLDVLREPRLNHQVEVIEGVMAAESQHLLKEFFRRLRAKDRVPATPDPFPNAGE

SEQ ID NO: 419 - protein, 149 aa, Unknown
  Description of Unknown: uncultivated organism
  Category: MG68 putative adenosine deaminase (TadA-like)
  Description: MG68-37 deaminase
MEEEYFMREALKEAEKAAQEGEVPIGAVVVGPSREIIGRGYNRPIGLCDPTAHAEIMALREAAKRLGNYRLLDCEIYVTLEPCPMCAGALVYARLKRLVFGAHDPKAGACGSVYNIVQDKRLNHQLEVAGGLLAEECRALLQAFFKSRR

SEQ ID NO: 420 - protein, 160 aa, Unknown
  Description of Unknown: uncultivated organism
  Category: MG68 putative adenosine deaminase (TadA-like)
  Description: MG68-38 deaminase
MFEFSDNKAEFFMKQAILQAIRAWKKGEVPVGAVVVSGAGQILASAHNCPISLDDPTAHAEILALRLAAGKVGNYRLTDSWLISTLEPCVMCAGAMVWARVKGVVFGARDPVSGAFGSVMDINEVPGLNHRIEVTEGVLAAECSQLLKDFFKRRRQSSAG

SEQ ID NO: 421 - protein, 148 aa, Unknown
  Description of Unknown: uncultivated organism
  Category: MG68 putative adenosine deaminase (TadA-like)
  Description: MG68-39 deaminase
MTDENWMQRALQLAAQAEAVGEVPVGAVIVKNDTLVAEGFNQPIGAHDATAHAEIVALRRAGEALGNYRLVDTTLYVTLEPCSMCVGAMIHARVAKVVFGASDPRTGALGGAFDLQQAGRHNHRFDVVSGVMADSSRQLLQNFFRVRR

SEQ ID NO: 422 - protein, 149 aa, Unknown
  Description of Unknown: uncultivated organism
  Category: MG68 putative adenosine deaminase (TadA-like)
  Description: MG68-40 deaminase
MTEDEKWMNLAIEQAIKAQDEDEVPVGAVLVKNGLLLSQAHNQPISTNDATAHAEIQALRKAGIKLQNYRLTDSTLYVTLEPCAMCLGAMMHARIARIVYGANDLKTGACGSSENLLNANCFNHKIHLISGVLENECKQLLKKFFNSRR

SEQ ID NO: 423 - protein, 185 aa, Unknown
  Description of Unknown: uncultivated organism
  Category: MG68 putative adenosine deaminase (TadA-like)
  Description: MG68-41 deaminase
MNQVNCGRIGSRLIRTGGVNISRAPIEEDPVNDLQYAQDTKWMRCALDCARRAYSTEEVPIGAVLVRNEQIIGEGFNQTIRNLDPTSHAEIMAIRSAAENIGNYRLSDTTLYVTIEPCMMCLGAIIHARVERLVFGAQEPKAGVLKSHPVFDGDFLNHQVKWSSGILESECSRLMRDFFIHKRTL

SEQ ID NO: 424 - protein, 203 aa, Unknown
  Description of Unknown: uncultivated organism
  Category: MG68 putative adenosine deaminase (TadA-like)
  Description: MG68-42 deaminase
MAPVPLKQPLAGESFDAHDHAMMRLAIDQALNAQLHGEVPVGAVLVKGGQVIATGYNHPIGSHDPTAHAEIRTLRMAAEQLGNYRLGESTLYVTLEPCMMCLGAMLHARITRVVFGASDPKTGVCGGVLDLPAEGRLNHQTTVQGGLLAEECGELLQRFFAERRAQRRADREALRAQQDELLRWAATLPAEEEVGTLRLDEET

SEQ ID NO: 425 - protein, 150 aa, Unknown
  Description of Unknown: uncultivated organism
  Category: MG68 putative adenosine deaminase (TadA-like)
  Description: MG68-43 deaminase
MAMALAEAEKAMQIGEVPIGAVVVGPDQQLLGTGYNQSICLNDPSAHAEMLAIRAAAAQLGNYRLRDCTLYVTLEPCAMCMGAILHSRIQRVVFAAADPKTGACGSVLSLQSEPRLNHHCSVTQGVLAERAASLIKGFFKARRQVKKCRC

SEQ ID NO: 426 - protein, 164 aa, Unknown
  Description of Unknown: uncultivated organism
  Category: MG68 putative adenosine deaminase (TadA-like)
  Description: MG68-44 deaminase
MLHMVYYEINETNSQDVFFMRRALTLAQKAASADEVPVGAVAIANNEIIGEGFNCPIGTHDPTAHAEIMALRQAAQKSNNYRLPEVTLYVTLEPCVMCVGAMLHARIKRLVFGAIDQKTGAVVSVFKILDEKNLNHRIQYQSGVLAVPCGKILSDFFKDRRGVI

SEQ ID NO: 427 - protein, 180 aa, Unknown
  Description of Unknown: uncultivated organism
  Category: MG68 putative adenosine deaminase (TadA-like)
  Description: MG68-45 deaminase
MTALITTSNIHDKMMSLALKEAFKAYKLGEIPVGCVITDENNELVATGFNRTIIDNDPSAHAEIVALRKAGEKLQNYRLVNLNLYVTLEPCTMCSGAIIHARIKRVFFGAYDLKTGACGSVFNVLNDDRHNHKVEIYGGILKEECSSMLSDFFKARRKMQKEGRDWIVESGKDRTWLNKD

SEQ ID NO: 428 - protein, 153 aa, Unknown
  Description of Unknown: uncultivated organism
  Category: MG68 putative adenosine deaminase (TadA-like)
  Description: MG68-46 deaminase
MISDTEFMGAALELALAASKLGEVPVGAVVVKGGRIIGTGSNAPISRHDPTAHAEILALRAAASALENYRLTECTLYVTLEPCAMCAGAIQHARIARLVFGASDSKTGACGSVVNLFGEPMLNHHTQVQGGMLARDCGELLSDFFRQRRAAVQ

SEQ ID NO: 429 - protein, 160 aa, Unknown
  Description of Unknown: uncultivated organism
  Category: MG68 putative adenosine deaminase (TadA-like)
  Description: MG68-47 deaminase
MSGSDAAASRACMEQALACARDAEAAGEVPVGAVIVDAAGAVVARAANAPIARNDPTAHAELLVLRAAGRVLGNYRLPGCVLYVTLEPCAMCVGALVHARIARIVYGAPDPKTGACGSVFDLAANSKMNHRIEVAGGVLAEECGALLKQFFAARRGRDAP

SEQ ID NO: 430 - protein, 151 aa, Unknown
  Description of Unknown: uncultivated organism
  Category: MG68 putative adenosine deaminase (TadA-like)
  Description: MG68-48 deaminase
MFSRADQVFMRQALELAKQAKGEGEVPVGAVLTLNDLPIATAYNQSITHQDPTAHAEIIVLREAAKILKNYRLVNTVLYVTLEPCAMCAGALIHARVKRLIYATADPRTGACGSIFNLINHQALNHQIQYESGLLAEESKLLLQQFFQKRR

SEQ ID NO: 431 - protein, 148 aa, Unknown
  Description of Unknown: uncultivated organism
  Category: MG68 putative adenosine deaminase (TadA-like)
  Description: MG68-49 deaminase
MNDEHYIQYALNLAQKAESENEVPVGALIVCNNQIIAEGWNQPIQLHDSSAHAEMLALRKASHHIENYRLKNTTLYVTLEPCAMCVGAMIHARIQKLVFGAWDQKAGAVHSVFQLIDDTRHNHAIEWRGGVMADACSRVLKNFFKQRR

SEQ ID NO: 432 - protein, 153 aa, Unknown
  Description of Unknown: uncultivated organism
  Category: MG68 putative adenosine deaminase (TadA-like)
  Description: MG68-50 deaminase
MTSHDDTYWIIHALTLAKKAEQQGEVPVGAVIVHDHQIVGEGWNQPIGAGDPTAHAEIIAMRNAAQHLKNYRLINCTLYVTLEPCAMCVGAMVHARISRLVFGAFDPKAGAVTSVMQLLDAPHFNHIVTHQGGICAEKCSEILKSFFAMKRKT

SEQ ID NO: 433 - protein, 155 aa, Unknown
  Description of Unknown: uncultivated organism
  Category: MG68 putative adenosine deaminase (TadA-like)
  Description: MG68-51 deaminase
MTDDRDLYWMQQALLLAVDAGRRGEVPVGALLVLDEVSIGVGYNRPIGDRDPTAHAEIIALRDAAKKINNYRLLDTTLYVTLEPCMMCAAAMVHARIKRLVYGAPDPKAGAIVSQAQILDAPFFNHRVAYYGNLLAMPCGELLRTFFKAKRLSST

SEQ ID NO: 434 - protein, 153 aa, Unknown
  Description of Unknown: uncultivated organism
  Category: MG68 putative adenosine deaminase (TadA-like)
  Description: MG68-52 deaminase
MRLAMDMAKEAYSIGEVPVGCVIADADGNVISTGYNRSITDNDPSAHAEMVAIRNAGSLLKNYRMPGLSLYVTLEPCCMCSGAIIHARIARVYYGASDLKTGACGSVFNVMSDPRHNHSVECIGGILADECSKMLSDFFKERRQQKKAEATKL

SEQ ID NO: 435 - protein, 174 aa, Unknown
  Description of Unknown: uncultivated organism
  Category: MG68 putative adenosine deaminase (TadA-like)
  Description: MG68-53 deaminase
MTVNHEYFMRLAIEQALLAYQAGEIPVGAVIVDTDGNVIGRGFNRTILDNDPSAHAEIVALRDAGERVKNYRLINLDMYVTLEPCTMCSGALIHSRLNNLYFGAYDLKTGACGSRFNILGSSEYNHIVNVTGGILKEECQNIISDFFKARRKMQKDGRDWIVESGKVRSWQKNV

SEQ ID NO: 436 - protein, 172 aa, Unknown
  Description of Unknown: uncultivated organism
  Category: MG68 putative adenosine deaminase (TadA-like)
  Description: MG68-54 deaminase
MTSPTAGLGETDEYWMNRALALAAEAGESGEVPVGAVVVLDGREVGAGYNGPIGSCDPTAHAEIRALRDAGARAGNYRLPGATLYVTLEPCTMCVGAIVHARINRLVYGTTEPKAGAVESIRQTLRDDHFNWQVEATGGVLASQCREIIQRFFAGRREYHRLRKQTLSVKEQ

SEQ ID NO: 437 - protein, 158 aa, Unknown
  Description of Unknown: uncultivated organism
  Category: MG68 putative adenosine deaminase (TadA-like)
  Description: MG68-55 deaminase
MPDLDDGYWMQQALKLAAQAKDQGEVPVGALVVGEQKLLGQGYNQVISLQDPSAHAEVMALRGAGITQQNYRLVNTTLYVTLEPCMMCAGVLVHARIKRLVFGAYDPKAGAISSCAQLLTLPHLNHQILVQGGILAKECGQQLTDFFKAKRQAKHDKG

SEQ ID NO: 438 - protein, 157 aa, Unknown
  Description of Unknown: uncultivated organism
  Category: MG68 putative adenosine deaminase (TadA-like)
  Description: MG68-56 deaminase
MTAAAEFDEHDLRWMRQALELARRAERDHAEVPVGAVLVIDNEVIGSGMNRNIIDHDASAHAEIVCLRDAGQRVANHRFPGSTLYVTLEPCVMCAGAIVHARVGRVVYAASDPKTGAAGSVFDILTSERHNHRVAVRGGLLAEESARLLQLFFRSRR

SEQ ID NO: 439 - protein, 176 aa, Unknown
  Description of Unknown: uncultivated organism
  Category: MG68 putative adenosine deaminase (TadA-like)
  Description: MG68-57 deaminase
MSESSAVYSDEYWLRYALQLAERAYQQGEVPVGAVLVRDNQILGEGWNQSISQHDATAHAEIMALRAAGLVAGNYRLPNTSLYVTLEPCVMCAGALLHARVERVVFGAYDPKTGAVGSMFDVLLDARHNHQVQLTGGVLQADCVAQLQAFFKERRLAQKLAKFNSVTISSPTSTEN

SEQ ID NO: 440 - protein, 158 aa, Unknown
  Description of Unknown: uncultivated organism
  Category: MG68 putative adenosine deaminase (TadA-like)
  Description: MG68-58 deaminase
MSLADRHEMFMQMALQQAQLAYDCAEVPVGAVVVNSAGEVIGKGYNRTIIDSDPTAHAEIVALRQAAAHEQNYRLPDLTVYVTLEPCVMCIGALTHARIAHVVYGASDPKTGACGSVLCIQANKKINHHTRITSGVLEQACAEKLRHFFRERRKGSKL

SEQ ID NO: 441 - protein, 154 aa, Unknown
  Description of Unknown: uncultivated organism
  Category: MG68 putative adenosine deaminase (TadA-like)
  Description: MG68-59 deaminase
MADDDFMALAIEQALLAQAQGEVPVGAVLVDGSGHVIGRGANAVIGLSDPTAHAEIVALRSAAKLLGNYRLPQTTLFVTLEPCAMCLGALFHARVSRIVFGAPDPKTGACGSRLDLTAPDLINFHASVRGGVMQEACGHLLTDFFKRKRSEKLS

SEQ ID NO: 442 - protein, 204 aa, Unknown
  Description of Unknown: uncultivated organism
  Category: MG68 putative adenosine deaminase (TadA-like)
  Description: MG68-60 deaminase
MRVALGAAREAQAAGEVPVGAVIVRDGVLIATGRNAPRQQHDPTAHAEIAALRAAARRLGNYRLDGCTLYVTLEPCLMCVGAMLHARLERVVFGAPDPKTGAAGSVFNALAEPKLNHQTTVEGGVLATECAALLQVFFGQRRLLQRISAQPLRDDALRTSEARMAAFASPLSRWVCDLPALQGLRLHYLDMGPSTEGRAWLLLH

SEQ ID NO: 443 - protein, 168 aa, Unknown
  Description of Unknown: uncultivated organism
  Category: MG68 putative adenosine deaminase (TadA-like)
  Description: MG68-61 deaminase
MNTEQSKPLLGDAHFMQQALQLADAAFALQEVPVGAVVVQDGIIIGRGFNAPITQHDPCAHAEILALRDAAKNIGNYRLVGCELFVTLEPCVMCAGAMMHARIARVVYGAYDLKTGACGSVQNVFNEPRWNHHTICTGGVLAEQCGTKLSQFFALRRAQKKSLTATWT

SEQ ID NO: 444 - protein, 283 aa, Unknown
  Description of Unknown: uncultivated organism
  Category: MG121 deaminase
  Description: MG121-1 deaminase
MKVTLGGQTIDVEEVLKRISSTTVAAALIKDGEVVAVEETGGEHAEKKLVRKHDVEGAVIFVTARPCRYCAEAMAEAGVAGVVYLGKGRGYGPYLLERLGVPCVEVHPSEPPAWRPVPRLDVLITFGGNPYLTEEDVAARTYALLTGIGVEAEVVPAPNNMAGRVEVMVKRGDPDRAHGRLKETFGPVFKVRRFQLSGDYEDRESLAEDVLEVVEPLIEDPFAVRANVASPGPTFSGSKEAEVFIGDVLTSAGHEVDLEDPRTLVHVDVLGRRVSVGVERRDG

SEQ ID NO: 445 - protein, 279 aa, Unknown
  Description of Unknown: uncultivated organism
  Category: MG121 deaminase
  Description: MG121-2 deaminase
VKITLAGETIDVEKVLREIPTRTVTAALIKDGEVKAYEEADGEHAEKKLIRNHDVSDGVVFVTIRPCLYCARELAKAGVAGVVYIGRGRGLGPYYLARKGIEVVEVNPSRPLHYDPVERLDVLVTFGGNPYLTEEDVAARVYCLLTGKGIKAEIAPAPENLAGRVEVMITDGDSERAARVIERELPTFNVRHFLLSDRFDDREELSKRVLEEIEPRVEDPFAVRARIARAGLFSSSRDAEVFLGDVLTSAGHEVDLDEPRTVVHVDVLGDRVSVGVEKR

SEQ ID NO: 446 - protein, 283 aa, Unknown
  Description of Unknown: uncultivated organism
  Category: MG121 deaminase
  Description: MG121-3 deaminase
MKVTLGGQTIDVEEVLKRISSTTVAAALIKDGEVVAVEETGGEHAEKKLVRKHDVEGAVIFVTARPCRYCAEAMAEAGVAGVVYLGKGRGYGPYLLERLGVPCVEVHPSEPPAWRPVPRLDVLITFGGNPYLTEEDVAARTYALLTGIGIEAEVVPAPNNMAGRVEVMVKRGDPDRAHGRLKETFGSVFKVRRFQLSGDYEDRESLAEDVLEVVEPLIEDPFAVRANVASPGPTFSGSKEAEVFIGDVLTSAGHEVDLEDPRTLVHVDVLGRRVSVGVERRDG

SEQ ID NO: 447 - protein, 280 aa, Unknown
  Description of Unknown: uncultivated organism
  Category: MG121 deaminase
  Description: MG121-4 deaminase
MRSAEYLAYLRRRYGLRPNRRLGQHFMVDDRLLRFMVEAAGVGPEDTVLEIGPGPGLLTRYLIERAGRVVAVELDERLVEVLERELGDAENLEIVHADFLEYGVPEEVNKVVSNLPYQISSEATFEILRSDVERAVLTYQREFAERMTAEPGTRGYGRLTVMVNLLARVEVLRAVPRRAFVPPPRVSSAIVRLEPRPESELPDVDPETLEAVCRGLFQHRRKTVRNALRLSAHEWGGDEEVVEEVLRRLPEELLDKRPLHLTPEEVVRVARCVERARGSS

SEQ ID NO: 448 - protein, 167 aa, Artificial Sequence
  Description of Artificial Sequence: Synthetic polypeptide
  Category: MG68 putative adenosine deaminase (TadA-like)
  Description: MG68-4_V1
MTDSQNDTDEYWMGEALKLAQKAWDEGEVPVGAILVRKGEVIGHGWNRSIGSHDPSAHAEIMAIREAGVRIGNYRMLDTVLYVTLEPCAMCAGALVHGRISRLVFGAENPKTGACGSVMDIARHPALNHQLQVDGGVMAAPCARLLSDFFRWRRAQKKAARDNSSGN

SEQ ID NO: 449 - protein, 167 aa, Artificial Sequence
  Description of Artificial Sequence: Synthetic polypeptide
  Category: MG68 putative adenosine deaminase (TadA-like)
  Description: MG68-4_V2
MTDSQNDTDEYWMGEALKLAQKAWDEGEVPVGAILVRKGEVIGHGWNRSIGSHDPSAHAEIMAIREAGVRIGNYRMLDTVLYVTLEPCAMCAGALVHGRISRLVFGVENPKTGACGSVMDIARHPALNHQLQVDGGVMAAPCARLLSDFFRWRRAQKKAARDNSSGN

SEQ ID NO: 450 - protein, 167 aa, Artificial Sequence
  Description of Artificial Sequence: Synthetic polypeptide
  Category: MG68 putative adenosine deaminase (TadA-like)
  Description: MG68-4_V3
MTDSQNDTDEYWMGEALKLAQKAWDEGEVPVGAILVRKGEVIGHGWNRSIGSHDPSAHAEIMAIREAGVRIGNYRMLDTVLYVTLEPCAMCAGALVHGRISRLVFGAENPKTGACGSVMDIARHPALNHQLQVDGGVMAAPCARLLSYFFRWRRAQKKAARDNSSGN

SEQ ID NO: 451 - protein, 167 aa, Artificial Sequence
  Description of Artificial Sequence: Synthetic polypeptide
  Category: MG68 putative adenosine deaminase (TadA-like)
  Description: MG68-4_V4
MTDSQNDTDEYWMGEALKLAQKAWDEGEVPVGAILVRKGEVIGHGWNRSIGSHDPSAHAEIMAIREAGVRIGNYRMLDTVLYVTFEPCAMCAGALVHGRISRLVFGAENPKTGACGSVMDIARHPALNHQLQVDGGVMAAPCARLLSDFFRWRRAQKKAARDNSSGN

SEQ ID NO: 452 - protein, 167 aa, Artificial Sequence
  Description of Artificial Sequence: Synthetic polypeptide
  Category: MG68 putative adenosine deaminase (TadA-like)
  Description: MG68-4_V5
MTDSQNDTDEYWMGEALKLAQKAWDEGEVPVGAILVRKGEVIGHGWNRSIGSHDPSAHAEIMAIREAGVRIGNYRMLDTVLYVTLEPCAMCAGALVHGRISRLVFGAENPKTGACGSVMDIARYPALNHQLQVDGGVMAAPCARLLSDFFRWRRAQKKAARDNSSGN

SEQ ID NO: 453 - protein, 167 aa, Artificial Sequence
  Description of Artificial Sequence: Synthetic polypeptide
  Category: MG68 putative adenosine deaminase (TadA-like)
  Description: MG68-4_V6
MTDSQNDTDEYWMGEALKLAQKAWDEGEVPVGAILVRKGEVIGHGWNRSIGSHDPSAHAEIMAIREAGVRIGNYRMLDTVLYVTLEPCAMCAGALVHGRISRLVFGAENPKTGACGSVMDIARHPALNHQLQVDGGVMAAPCNRLLSDFFRWRRAQKKAARDNSSGN

SEQ ID NO: 454 - protein, 167 aa, Artificial Sequence
  Description of Artificial Sequence: Synthetic polypeptide
  Category: MG68 putative adenosine deaminase (TadA-like)
  Description: MG68-4_V7
MTDSQNDTDEYWMGEALKLAQKAWDEGEVPVGAILVRKGEVIGHGWNRSIGSHDPSAHAEIMAIREAGVRIGNYRMLDTVLYVTLEPCAMCAGALVHGRISRLVFGAENPKTGACGSVMDIARHPALNHQLQVDGGVMAAPCARLLCDFFRWRRAQKKAARDNSSGN

SEQ ID NO: 455 - protein, 167 aa, Artificial Sequence
  Description of Artificial Sequence: Synthetic polypeptide
  Category: MG68 putative adenosine deaminase (TadA-like)
  Description: MG68-4_V8
MTDSQNDTDEYWMGEALKLAQKAWDEGEVPVGAILVRKGEVIGHGWNRSIGSHDPSAHAEIMAIREAGVRIGNYRMLDTVLYVTLEPCAMCAGALVHGRISRLVFGAENPKTGACGSVMDIARHPALNHQLQVDGGVMAAPCARLLSDFFRWRRAQKNAARDNSSGN

SEQ ID NO: 456 - protein, 167 aa, Artificial Sequence
  Description of Artificial Sequence: Synthetic polypeptide
  Category: MG68 putative adenosine deaminase (TadA-like)
  Description: MG68-4_V9
MTDSQNDTDEYWMGEALKLAQKARDEGEVPVGAILVRKGEVIGHGWNRSIGSHDPSAHAEIMAIREAGVRIGNYRMLDTVLYVTLEPCAMCAGALVHGRISRLVFGAENPKTGACGSVMDIARHPALNHQLQVDGGVMAAPCARLLSDFFRWRRAQKKAARDNSSGN

SEQ ID NO: 457 - protein, 167 aa, Artificial Sequence
  Description of Artificial Sequence: Synthetic polypeptide
  Category: MG68 putative adenosine deaminase (TadA-like)
  Description: MG68-4_V10
MTDSQNDTDEYWMGEALKLAQKAWDEGEVPVGAILVRKGEVIGHGWNRSIGSHDPSAHAEIMAIREAGVRIGNYRMLDTVLYSTLEPCAMCAGALVHGRISRLVFGAENPKTGACGSVMDIARHPALNHQLQVDGGVMAAPCARLLSDFFRWRRAQKKAARDNSSGN

SEQ ID NO: 458 - protein, 167 aa, Artificial Sequence
  Description of Artificial Sequence: Synthetic polypeptide
  Category: MG68 putative adenosine deaminase (TadA-like)
  Description: MG68-4_V11
MTDSQNDTDEYWMGEALKLAQKAWDEGEVPVGAILVRKGEVIGHGWNRSIGSHDPSAHAEIMAIREAGVRIGNYRMLDTVLYVTLEPCAMCAGALVHGRISRLVFGAENPKRGACGSVMDIARHPALNHQLQVDGGVMAAPCARLLSDFFRWRRAQKKAARDNSSGN

SEQ ID NO: 459 - protein, 167 aa, Artificial Sequence
  Description of Artificial Sequence: Synthetic polypeptide
  Category: MG68 putative adenosine deaminase (TadA-like)
  Description: MG68-4_V12
MTDSQNDTDEYWMGEALKLAQKAWDEGEVPVGAILVRKGEVIGHGWNRSIGSHDPSAHAEIMAIREAGVRIGNYRMLDTVLYVTLEPCAMCAGALVHGRISRLVFGAENPKTGACGSVMDIARHPALNHQLQVDGGVMAAPCARLLSRFFRWRRAQKKAARDNSSGN

SEQ ID NO: 460 - protein, 167 aa, Artificial Sequence
  Description of Artificial Sequence: Synthetic polypeptide
  Category: MG68 putative adenosine deaminase (TadA-like)
  Description: MG68-4_V13
MTDSQNDTDEYWMGEALKLAQKAWDEGEVPVGAILVRKGEVIGHGWNRSIGSHDPSAHAEIMAIREAGVRIGNYRMLDTVLYVTLEPCAMCAGALVHGRISRLVFGAENPKTGACGSVMDIARHPALNHQLQVDGGVMAAPCARLLSDFFRWRPAQKKAARDNSSGN

SEQ ID NO: 461 - protein, 167 aa, Artificial Sequence
  Description of Artificial Sequence: Synthetic polypeptide
  Category: MG68 putative adenosine deaminase (TadA-like)
  Description: MG68-4_V14
MTDSQNDTDEYWMGEALKLAQKAWDEGEVPVGAILVRKGEVIGHGWNRSIGSHDPSAHAEIMAIREAGVRIGNYRMLDTVLYVTLEPCAMCAGALVHGRISRLVFGVENPKTGACGSVMDIARHPALNHQLQVDGGVMAAPCARLLSYFFRWRRAQKKAARDNSSGN

SEQ ID NO: 462 - protein, 167 aa, Artificial Sequence
  Description of Artificial Sequence: Synthetic polypeptide
  Category: MG68 putative adenosine deaminase (TadA-like)
  Description: MG68-4_V15
MTDSQNDTDEYWMGEALKLAQKAWDEGEVPVGAILVRKGEVIGHGWNRSIGSHDPSAHAEIMAIREAGVRIGNYRMLDTVLYVTFEPCAMCAGALVHGRISRLVFGVENPKTGACGSVMDIARHPALNHQLQVDGGVMAAPCARLLSYFFRWRRAQKKAARDNSSGN

SEQ ID NO: 463 - protein, 167 aa, Artificial Sequence
  Description of Artificial Sequence: Synthetic polypeptide
  Category: MG68 putative adenosine deaminase (TadA-like)
  Description: MG68-4_V16
MTDSQNDTDEYWMGEALKLAQKAWDEGEVPVGAILVRKGEVIGHGWNRSIGSHDPSAHAEIMAIREAGVRIGNYRMLDTVLYVTFEPCAMCAGALVHGRISRLVFGVENPKTGACGSVMDIARYPALNHQLQVDGGVMAAPCARLLSDFFRWRRAQKKAARDNSSGN

SEQ ID NO: 464 - protein, 167 aa, Artificial Sequence
  Description of Artificial Sequence: Synthetic polypeptide
  Category: MG68 putative adenosine deaminase (TadA-like)
  Description: MG68-4_V17
MTDSQNDTDEYWMGEALKLAQKAWDEGEVPVGAILVRKGEVIGHGWNRSIGSHDPSAHAEIMAIREAGVRIGNYRMLDTVLYVTFEPCAMCAGALVHGRISRLVFGVENPKTGACGSVMDIARYPALNHQLQVDGGVMAAPCNRLLSYFFRWRRAQKKAARDNSSGN

SEQ ID NO: 465 - protein, 167 aa, Artificial Sequence
  Description of Artificial Sequence: Synthetic polypeptide
  Category: MG68 putative adenosine deaminase (TadA-like)
  Description: MG68-4_V18
MTDSQNDTDEYWMGEALKLAQKAWDEGEVPVGAILVRKGEVIGHGWNRSIGSHDPSAHAEIMAIREAGVRIGNYRMLDTVLYVTFEPCAMCAGALVHGRISRLVFGVENPKTGACGSVMDIARYPALNHQLQVDGGVMAAPCARLLCYFFRWRRAQKKAARDNSSGN

SEQ ID NO: 466 - protein, 167 aa, Artificial Sequence
  Description of Artificial Sequence: Synthetic polypeptide
  Category: MG68 putative adenosine deaminase (TadA-like)
  Description: MG68-4_V19
MTDSQNDTDEYWMGEALKLAQKAWDEGEVPVGAILVRKGEVIGHGWNRSIGSHDPSAHAEIMAIREAGVRIGNYRMLDTVLYVTFEPCAMCAGALVHGRISRLVFGVENPKTGACGSVMDIARYPALNHQLQVDGGVMAAPCARLLSYFFRWRRAQKNAARDNSSGN

SEQ ID NO: 467 - protein, 167 aa, Artificial Sequence
  Description of Artificial Sequence: Synthetic polypeptide
  Category: MG68 putative adenosine deaminase (TadA-like)
  Description: MG68-4_V20
MTDSQNDTDEYWMGEALKLAQKAWDEGEVPVGAILVRKGEVIGHGWNRSIGSHDPSAHAEIMAIREAGVRIGNYRMLDTVLYVTFEPCAMCAGALVHGRISRLVFGVENPKTGACGSVMDIARYPALNHQLQVDGGVMAAPCARLLCYFFRWRRAQKNAARDNSSGN

SEQ ID NO: 468 - protein, 167 aa, Artificial Sequence
  Description of Artificial Sequence: Synthetic polypeptide
  Category: MG68 putative adenosine deaminase (TadA-like)
  Description: MG68-4_V21
MTDSQNDTDEYWMGEALKLAQKARDEGEVPVGAILVRKGEVIGHGWNRSIGSHDPSAHAEIMAIREAGVRIGNYRMLDTVLYVTFEPCAMCAGALVHGRISRLVFGVENPKTGACGSVMDIARYPALNHQLQVDGGVMAAPCARLLCYFFRWRRAQKNAARDNSSGN

SEQ ID NO: 469 - protein, 167 aa, Artificial Sequence
  Description of Artificial Sequence: Synthetic polypeptide
  Category: MG68 putative adenosine deaminase (TadA-like)
  Description: MG68-4_V22
MTDSQNDTDEYWMGEALKLAQKARDEGEVPVGAILVRKGEVIGHGWNRSIGSHDPSAHAEIMAIREAGVRIGNYRMLDTVLYVTFEPCAMCAGALVHGRISRLVFGVENPKTGACGSVMDIARYPALNHQLQVDGGVMAAPCNRLLCYFFRWRRAQKNAARDNSSGN

SEQ ID NO: 470 - protein, 167 aa, Artificial Sequence
  Description of Artificial Sequence: Synthetic polypeptide
  Category: MG68 putative adenosine deaminase (TadA-like)
  Description: MG68-4_V23
MTDSQNDTDEYWMGEALKLAQKARDEGEVPVGAILVRKGEVIGHGWNRSIGSHDPSAHAEIMAIREAGVRIGNYRMLDTVLYVTFEPCAMCAGALVHGRISRLVFGVENPKTGACGSVMDIARYPALNHQLQVDGGVMAAPCNRLLCYFFRWRPAQKNAARDNSSGN

SEQ ID NO: 471 - protein, 167 aa, Artificial Sequence
  Description of Artificial Sequence: Synthetic polypeptide
  Category: MG68 putative adenosine deaminase (TadA-like)
  Description: MG68-4_V24
MTDSQNDTDEYWMGEALKLAQKARDEGEVPVGAILVRKGEVIGHGWNRSIGSHDPSAHAEIMAIREAGVRIGNYRMLDTVLYSTFEPCAMCAGALVHGRISRLVFGVENPKTGACGSVMDIARYPALNHQLQVDGGVMAAPCNRLLCYFFRWRPAQKNAARDNSSGN

SEQ ID NO: 472 - protein, 167 aa, Artificial Sequence
  Description of Artificial Sequence: Synthetic polypeptide
  Category: MG68 putative adenosine deaminase (TadA-like)
  Description: MG68-4_V25
MTDSQNDTDEYWMGEALKLAQKARDEGEVPVGAILVRKGEVIGHGWNRSIGSHDPSAHAEIMAIREAGVRIGNYRMLDTVLYSTFEPCAMCAGALVHGRISRLVFGVENPKTGACGSVMDIARHPALNHQLQVDGGVMAAPCNRLLCYFFRWRPAQKNAARDNSSGN

SEQ ID NO: 473 - protein, 167 aa, Artificial Sequence
  Description of Artificial Sequence: Synthetic polypeptide
  Category: MG68 putative adenosine deaminase (TadA-like)
  Description: MG68-4_V26
MTDSQNDTDEYWMGEALKLAQKARDEGEVPVGAILVRKGEVIGHGWNRSIGSHDPSAHAEIMAIREAGVRIGNYRMLDTVLYSTFEPCAMCAGALVHGRISRLVFGVENPKTGACGSVMDIARHPALNHQLQVDGGVMAAPCNRLLCRFFRWRPAQKNAARDNSSGN

SEQ ID NO: 474 - protein, 167 aa, Artificial Sequence
  Description of Artificial Sequence: Synthetic polypeptide
  Category: MG68 putative adenosine deaminase (TadA-like)
  Description: MG68-4_V27
MTDSQNDTDEYWMGEALKLAQKARDEGEVPVGAILVRKGEVIGHGWNRSIGSHDPSAHAEIMAIREAGVRIGNYRMLDTVLYSTFEPCAMCAGALVHGRISRLVFGVENPKRGACGSVMDIARHPALNHQLQVDGGVMAAPCNRLLCRFFRWRPAQKNAARDNSSGN

SEQ ID NO: 475 - protein, 167 aa, Artificial Sequence
  Description of Artificial Sequence: Synthetic polypeptide
  Category: MG68 putative adenosine deaminase (TadA-like)
  Description: MG68-4_V28
MTDSQNDTDEYWMGEALKLAQKARDEGEVPVGAILVRKGEVIGHGWNRSIGSHDPSAHAEIMAIREAGVRIGNYRMLDTVLYSTFEPCAMCAGALVHGRISRLVFGVENPKRGACGSVMDIARHPALNHQLQVDGGVMAAPCNRLLCDFFRWRPAQKNAARDNSSGN

SEQ ID NO: 476 - protein, 962 aa, Artificial Sequence
  Description of Artificial Sequence: Synthetic polypeptide
  Category: adenine base editor
  Description: MG68-4_V1-nMG34-1 (D10A)
MTDSQNDTDEYWMGEALKLAQKAWDEGEVPVGAILVRKGEVIGHGWNRSIGSHDPSAHAEIMAIREAGVRIGNYRMLDTVLYVTLEPCAMCAGALVHGRISRLVFGAENPKTGACGSVMDIARHPALNHQLQVDGGVMAAPCARLLSDFFRWRRAQKKAARDNSSGNGTSGGSSGGSSGSETPGTSESATPESSGGSSGGSMERELVLGIAYGGKYTGLAVVDRRHNQVLYANRLKMRDDVAGILKDRRKQRGIRRTAQTKKKRLRELKNYLKSIGYNESTATFETVYSLAHKRGYDYADMPEEKTSEEIEAMDVEERKQWEKEKQEWEETKRNSRHRKEVVKDVHKAMIEGRATEEQIKRVERIFNKQYRPKRFNNRILTKCKVEDCGVNTPLRKNVRDLLIENIVRFFPIEQSEKDNLKDAVLDKNRREEVKSFFRKHKTDEHIRKQVYDIADNKLSGRTVFCKEHILEHTEHSKEERKVFRLAPSLKTKIENVLAVIKDEILPKFTVNKVVMESNNFDIAAKTQGKKRLAKEEYGKGPREGKETRKEALLRETDGRCIYCGKSIDISNAHDDHIFPRKAGGLNIFANLVACCAVCNENKKGRTPLESGISPKPEIIAFMKNDLKKKILEDARNINTVDFNKYMSHASIGWRYMRDRLRESAGNKKLPIERQSGIYTAYFRRWWGFKKERGNTLHHALDAVILASRKGYSDDGLVDMTLKPKYNKGGEFDPEKHLPEPIEFKMDKGSRGSALHDRNPLSYKKGIITRRFMVTEIECGKEDDVISETYREKLKEAFKRFDTKKGKCLTDKEAKEAGFCIKKNELVMSLKCSIKGTGPGQMIRINNNVFKTNVHNVGVDVYLDEKGKKKAYERKNPRLSKHFIEPPPQPNGRVSFTLKRRDMVTVEGEDAIYRIKKLGTSPTIEAVVGSDGKTRTVSATKLTKANSAELEGSGGSPKKKRKV

SEQ ID NO: 477 - protein, 1589 aa, Artificial Sequence
  Description of Artificial Sequence: Synthetic polypeptide
  Category: adenine base editor
  Description: MG68-4_V1-nSpCas9 (D10A)
MGSSHHHHHHMTDSQNDTDEYWMGEALKLAQKAWDEGEVPVGAILVRKGEVIGHGWNRSIGSHDPSAHAEIMAIREAGVRIGNYRMLDTVLYVTLEPCAMCAGALVHGRISRLVFGAENPKTGACGSVMDIARHPALNHQLQVDGGVMAAPCARLLSDFFRWRRAQKKAARDNSSGNSGGSSGGSSGSETPGTSESATPESSGGSSGGSMDKKYSIGLAIGTNSVGWAVITDEYKVPSKKFKVLGNTDRHSIKKNLIGALLFDSGETAEATRLKRTARRRYTRRKNRICYLQEIFSNEMAKVDDSFFHRLEESFLVEEDKKHERHPIFGNIVDEVAYHEKYPTIYHLRKKLVDSTDKADLRLIYLALAHMIKFRGHFLIEGDLNPDNSDVDKLFIQLVQTYNQLFEENPINASGVDAKAILSARLSKSRRLENLIAQLPGEKKNGLFGNLIALSLGLTPNFKSNFDLAEDAKLQLSKDTYDDDLDNLLAQIGDQYADLFLAAKNLSDAILLSDILRVNTEITKAPLSASMIKRYDEHHQDLTLLKALVRQQLPEKYKEIFFDQSKNGYAGYIDGGASQEEFYKFIKPILEKMDGTEELLVKLNREDLLRKQRTFDNGSIPHQIHLGELHAILRRQEDFYPFLKDNREKIEKILTFRIPYYVGPLARGNSRFAWMTRKSEETITPWNFEEVVDKGASAQSFIERMTNFDKNLPNEKVLPKHSLLYEYFTVYNELTKVKYVTEGMRKPAFLSGEQKKAIVDLLFKTNRKVTVKQLKEDYFKKIECFDSVEISGVEDRFNASLGTYHDLLKIIKDKDFLDNEENEDILEDIVLTLTLFEDREMIEERLKTYAHLFDDKVMKQLKRRRYTGWGRLSRKLINGIRDKQSGKTILDFLKSDGFANRNFMQLIHDDSLTFKEDIQKAQVSGQGDSLHEHIANLAGSPAIKKGILQTVKVVDELVKVMGRHKPENIVIEMARENQTTQKGQKNSRERMKRIEEGIKELGSQILKEHPVENTQLQNEKLYLYYLQNGRDMYVDQELDINRLSDYDVDHIVPQSFLKDDSIDNKVLTRSDKNRGKSDNVPSEEVVKKMKNYWRQLLNAKLITQRKFDNLTKAERGGLSELDKAGFIKRQLVETRQITKHVAQILDSRMNTKYDENDKLIREVKVITLKSKLVSDFRKDFQFYKVREINNYHHAHDAYLNAVVGTALIKKYPKLESEFVYGDYKVYDVRKMIAKSEQEIGKATAKYFFYSNIMNFFKTEITLANGEIRKRPLIETNGETGEIVWDKGRDFATVRKVLSMPQVNIVKKTEVQTGGFSKESILPKRNSDKLIARKKDWDPKKYGGFDSPTVAYSVLVVAKVEKGKSKKLKSVKELLGITIMERSSFEKNPIDFLEAKGYKEVKKDLIIKLPKYSLFELENGRKRMLASAGELQKGNELALPSKYVNFLYLASHYEKLKGSPEDNEQKQLFVEQHKHYLDEIIEQISEFSKRVILADANLDKVLSAYNKHRDKPIREQAENIIHLFTLTNLGAPAAFKYFDTTIDRKRYTSTKEVLDATLIHQSITGLYETRIDLSQLGGDGSGGSPKKKRKV

SEQ ID NO: 478 - protein, 1361 aa, Artificial Sequence
  Description of Artificial Sequence: Synthetic polypeptide
  Category: cytosine base editor
  Description: rAPOBEC1-nMG15-1 (D8A)
MGSSHHHHHHGMSSETGPVAVDPTLRRRIEPHEFEVFFDPRELRKETCLLYEINWGGRHSIWRHTSQNTNKHVEVNFIEKFTTERYFCPNTRCSITWFLSWSPCGECSRAITEFLSRYPHVTLFIYIARLYHHADPRNRQGLRDLISSGVTIQIMTEQESGYCWRNFVNYSPSNEAHWPRYPHLWVRLYVLELYCIILGLPPCLNILRRKQPQLTFFTIALQSCHYQRLPPHILWATGLKSGSETPGTSESATPESGMNYVLGLAVGIASVGWAVLELNEEDNPIRIEGLGARIFDKAEVPKTGASLAAPRRMSRGIRRVIRRRRFRLQRVRSYLKKHNILPAEKVDHLYDVPSAIDIYELRKRALTEKVTAEEWARLLIFFAKHRGFKSNRKKASGDADEGEMLKAIAANAEILKNYRTVGEMLCDNEKFRKRKRNRDGAYNFTVSRAMLMEEIHTLFEIQRNLGQKFADEKLEEEYVILFAAQRKFDEGPGENSPYAGNQIEKMIGSCTLEGKKEKRAPKASYAFMAFNLWQKINHLKVNRRGSERFLTEEERRRIADLAWKKEKLTYGSLRKVLSLDPEDRFVGLRYDLKKGKAENLEEPVSEAEKRSFSWVKDYHSIRKALDKVEKNRILKLSHEQLDTIATAFSVYKNEETIEKYLEEGGIGKADGEALLERLSGFSKFGHLSLKACYKLLPFLEKGEVYSRACELAGYDFSKSSLENIDDIPNPVVKRSISQTLKVINAIILRYGNPVEVHIELARELARSFRDRKKMEKGMQENQAKNEKIRQRLISEFGVLRPKGMDIVKFKLCEEQNGECAYSQKHFDMEKLLKDPSYAEVDHIIPYSRSFDDSYNNKVLVLTKENREKRNRIPMEYLADAPERKNRFIHWVKSTIRNSRKRENLLRTDYTATTENEWKRRNLQDTQYISKYLYNYLRHHLVLAKGYTERKRRIIPVNGAVTAYFRKRLGINKIRENGDLHHAVDAVIIACATQGIVNKVSRYSKSRELWDYEVDMETGEVLQKKNKNTKDVFPEPWLNFRYELEQKVRVRPLDIPETADITEMEEPFVSHMPNRKIHGPAHKETIRSGRLKEEGYTISKTALIDLKLTEDKEEIKGYYNKESDRLLYEALKKQLQRYGGKAKEAFKEPFHKPKADGTPGPIVNKVKIMEKSTMLIPVNGGKGLASNGNMVRIDVFRAEEKGKKKYYFIPVYVADTVKEELPNRAVLAHKPYEAWKIMKEENFIFSLYPNDLIFVDAGKEIPFKAALKGSTLDPEKKASRFLMYYKGADIATGSISGVNHDETYKARGVGIQSLREIKKCCIDVLGNISFASKEKRQTFRSGGSSSGGGASSGGSPKKKRKV

SEQ ID NO: 479 - protein, 1441 aa, Artificial Sequence
  Description of Artificial Sequence: Synthetic polypeptide
  Category: cytosine base editor
  Description: rAPOBEC1-nMG15-1 (D8A)-UGI (PBS1)
MGSSHHHHHHGMSSETGPVAVDPTLRRRIEPHEFEVFFDPRELRKETCLLYEINWGGRHSIWRHTSQNTNKHVEVNFIEKFTTERYFCPNTRCSITWFLSWSPCGECSRAITEFLSRYPHVTLFIYIARLYHHADPRNRQGLRDLISSGVTIQIMTEQESGYCWRNFVNYSPSNEAHWPRYPHLWVRLYVLELYCIILGLPPCLNILRRKQPQLTFFTIALQSCHYQRLPPHILWATGLKSGSETPGTSESATPESGMNYVLGLAVGIASVGWAVLELNEEDNPIRIEGLGARIFDKAEVPKTGASLAAPRRMSRGIRRVIRRRRFRLQRVRSYLKKHNILPAEKVDHLYDVPSAIDIYELRKRALTEKVTAEEWARLLIFFAKHRGFKSNRKKASGDADEGEMLKAIAANAEILKNYRTVGEMLCDNEKFRKRKRNRDGAYNFTVSRAMLMEEIHTLFEIQRNLGQKFADEKLEEEYVILFAAQRKFDEGPGENSPYAGNQIEKMIGSCTLEGKKEKRAPKASYAFMAFNLWQKINHLKVNRRGSERFLTEEERRRIADLAWKKEKLTYGSLRKVLSLDPEDRFVGLRYDLKKGKAENLEEPVSEAEKRSFSWVKDYHSIRKALDKVEKNRILKLSHEQLDTIATAFSVYKNEETIEKYLEEGGIGKADGEALLERLSGFSKFGHLSLKACYKLLPFLEKGEVYSRACELAGYDFSKSSLENIDDIPNPVVKRSISQTLKVINAIILRYGNPVEVHIELARELARSFRDRKKMEKGMQENQAKNEKIRQRLISEFGVLRPKGMDIVKFKLCEEQNGECAYSQKHFDMEKLLKDPSYAEVDHIIPYSRSFDDSYNNKVLVLTKENREKRNRIPMEYLADAPERKNRFIHWVKSTIRNSRKRENLLRTDYTATTENEWKRRNLQDTQYISKYLYNYLRHHLVLAKGYTERKRRIIPVNGAVTAYFRKRLGINKIRENGDLHHAVDAVIIACATQGIVNKVSRYSKSRELWDYEVDMETGEVLQKKNKNTKDVFPEPWLNFRYELEQKVRVRPLDIPETADITEMEEPFVSHMPNRKIHGPAHKETIRSGRLKEEGYTISKTALIDLKLTEDKEEIKGYYNKESDRLLYEALKKQLQRYGGKAKEAFKEPFHKPKADGTPGPIVNKVKIMEKSTMLIPVNGGKGLASNGNMVRIDVFRAEEKGKKKYYFIPVYVADTVKEELPNRAVLAHKPYEAWKIMKEENFIFSLYPNDLIFVDAGKEIPFKAALKGSTLDPEKKASRFLMYYKGADIATGSISGVNHDETYKARGVGIQSLREIKKCCIDVLGNISFASKEKRQTFRSGGSSRTNLSDIIEKETGKQLVIQESILMLPEEVEEVIGNKPESDILVHTAYDESTDENVMLLTSDAPEYKPWALVIQDSNGENKIKMLASSGGSPKKKRKV

SEQ ID NO: 480 - protein, 1442 aa, Artificial Sequence
  Description of Artificial Sequence: Synthetic polypeptide
  Category: cytosine base editor
  Description: rAPOBEC1-nMG15-1 (D8A)-MG69-1
MGSSHHHHHHGMSSETGPVAVDPTLRRRIEPHEFEVFFDPRELRKETCLLYEINWGGRHSIWRHTSQNTNKHVEVNFIEKFTTERYFCPNTRCSITWFLSWSPCGECSRAITEFLSRYPHVTLFIYIARLYHHADPRNRQGLRDLISSGVTIQIMTEQESGYCWRNFVNYSPSNEAHWPRYPHLWVRLYVLELYCIILGLPPCLNILRRKQPQLTFFTIALQSCHYQRLPPHILWATGLKSGSETPGTSESATPESGMNYVLGLAVGIASVGWAVLELNEEDNPIRIEGLGARIFDKAEVPKTGASLAAPRRMSRGIRRVIRRRRFRLQRVRSYLKKHNILPAEKVDHLYDVPSAIDIYELRKRALTEKVTAEEWARLLIFFAKHRGFKSNRKKASGDADEGEMLKAIAANAEILKNYRTVGEMLCDNEKFRKRKRNRDGAYNFTVSRAMLMEEIHTLFEIQRNLGQKFADEKLEEEYVILFAAQRKFDEGPGENSPYAGNQIEKMIGSCTLEGKKEKRAPKASYAFMAFNLWQKINHLKVNRRGSERFLTEEERRRIADLAWKKEKLTYGSLRKVLSLDPEDRFVGLRYDLKKGKAENLEEPVSEAEKRSFSWVKDYHSIRKALDKVEKNRILKLSHEQLDTIATAFSVYKNEETIEKYLEEGGIGKADGEALLERLSGFSKFGHLSLKACYKLLPFLEKGEVYSRACELAGYDFSKSSLENIDDIPNPVVKRSISQTLKVINAIILRYGNPVEVHIELARELARSFRDRKKMEKGMQENQAKNEKIRQRLISEFGVLRPKGMDIVKFKLCEEQNGECAYSQKHFDMEKLLKDPSYAEVDHIIPYSRSFDDSYNNKVLVLTKENREKRNRIPMEYLADAPERKNRFIHWVKSTIRNSRKRENLLRTDYTATTENEWKRRNLQDTQYISKYLYNYLRHHLVLAKGYTERKRRIIPVNGAVTAYFRKRLGINKIRENGDLHHAVDAVIIACATQGIVNKVSRYSKSRELWDYEVDMETGEVLQKKNKNTKDVFPEPWLNFRYELEQKVRVRPLDIPETADITEMEEPFVSHMPNRKIHGPAHKETIRSGRLKEEGYTISKTALIDLKLTEDKEEIKGYYNKESDRLLYEALKKQLQRYGGKAKEAFKEPFHKPKADGTPGPIVNKVKIMEKSTMLIPVNGGKGLASNGNMVRIDVFRAEEKGKKKYYFIPVYVADTVKEELPNRAVLAHKPYEAWKIMKEENFIFSLYPNDLIFVDAGKEIPFKAALKGSTLDPEKKASRFLMYYKGADIATGSISGVNHDETYKARGVGIQSLREIKKCCIDVLGNISFASKEKRQTFRSGGSSSKTIKDLEEFAAEKLGYDIVFQESISMEPQEVEHLITTDEKSVLVNSTYDDNKEITISMISTPHPEYRPIALIIQDMEGEVQRKELGSGGSPKKKRKV

SEQ ID NO: 481 - protein, 1443 aa, Artificial Sequence
  Description of Artificial Sequence: Synthetic polypeptide
  Category: cytosine base editor
  Description: rAPOBEC1-nMG15-1 (D8A)-MG69-2
MGSSHHHHHHGMSSETGPVAVDPTLRRRIEPHEFEVFFDPRELRKETCLLYEINWGGRHSIWRHTSQNTNKHVEVNFIEKFTTERYFCPNTRCSITWFLSWSPCGECSRAITEFLSRYPHVTLFIYIARLYHHADPRNRQGLRDLISSGVTIQIMTEQESGYCWRNFVNYSPSNEAHWPRYPHLWVRLYVLELYCIILGLPPCLNILRRKQPQLTFFTIALQSCHYQRLPPHILWATGLKSGSETPGTSESATPESGMNYVLGLAVGIASVGWAVLELNEEDNPIRIEGLGARIFDKAEVPKTGASLAAPRRMSRGIRRVIRRRRFRLQRVRSYLKKHNILPAEKVDHLYDVPSAIDIYELRKRALTEKVTAEEWARLLIFFAKHRGFKSNRKKASGDADEGEMLKAIAANAEILKNYRTVGEMLCDNEKFRKRKRNRDGAYNFTVSRAMLMEEIHTLFEIQRNLGQKFADEKLEEEYVILFAAQRKFDEGPGENSPYAGNQIEKMIGSCTLEGKKEKRAPKASYAFMAFNLWQKINHLKVNRRGSERFLTEEERRRIADLAWKKEKLTYGSLRKVLSLDPEDRFVGLRYDLKKGKAENLEEPVSEAEKRSFSWVKDYHSIRKALDKVEKNRILKLSHEQLDTIATAFSVYKNEETIEKYLEEGGIGKADGEALLERLSGFSKFGHLSLKACYKLLPFLEKGEVYSRACELAGYDFSKSSLENIDDIPNPVVKRSISQTLKVINAIILRYGNPVEVHIELARELARSFRDRKKMEKGMQENQAKNEKIRQRLISEFGVLRPKGMDIVKFKLCEEQNGECAYSQKHFDMEKLLKDPSYAEVDHIIPYSRSFDDSYNNKVLVLTKENREKRNRIPMEYLADAPERKNRFIHWVKSTIRNSRKRENLLRTDYTATTENEWKRRNLQDTQYISKYLYNYLRHHLVLAKGYTERKRRIIPVNGAVTAYFRKRLGINKIRENGDLHHAVDAVIIACATQGIVNKVSRYSKSRELWDYEVDMETGEVLQKKNKNTKDVFPEPWLNFRYELEQKVRVRPLDIPETADITEMEEPFVSHMPNRKIHGPAHKETIRSGRLKEEGYTISKTALIDLKLTEDKEEIKGYYNKESDRLLYEALKKQLQRYGGKAKEAFKEPFHKPKADGTPGPIVNKVKIMEKSTMLIPVNGGKGLASNGNMVRIDVFRAEEKGKKKYYFIPVYVADTVKEELPNRAVLAHKPYEAWKIMKEENFIFSLYPNDLIFVDAGKEIPFKAALKGSTLDPEKKASRFLMYYKGADIATGSISGVNHDETYKARGVGIQSLREIKKCCIDVLGNISFASKEKRQTFRSGGSSSKTIKDLEEFAAEKLGYDIVFQESISMEPQEVEHLITTDEKSVLVNSTYDDDKEITISVISTPHPEYRPIALVIQDMEGEVQRKELYGSGGSPKKKRKV

SEQ ID NO: 482 - protein, 1422 aa, Artificial Sequence
  Description of Artificial Sequence: Synthetic polypeptide
  Category: cytosine base editor
  Description: rAPOBEC1-nMG15-1 (D8A)-MG69-
MGSSHHHHHHGMSSETGPVAVDPTLRRRIEPHEFEVFFDPRELRKETCLLYEINWGGRHSIWRHTSQNTNKHVEVNFIEKFTTERYFCPNTRCSITWFLSWSPCGECSRAITEFLSRYPHVTLFIYIARLYHHADPRNRQGLRDLISSGVTIQIMTEQESGYCWRNFVNYSPSNEAHWPRYPHLWVRLYVLELYCIILGLPPCLNILRRKQPQLTFFTIALQSCHYQRLPPHILWATGLKSGSETPGTSESATPESGMNYVLGLAVGIASVGWAVLELNEEDNPIRIEGLGARIFDKAEVPKTGASLAAPRRMSRGIRRVIRRRRFRLQRVRSYLKKHNILPAEKVDHLYDVPSAIDIYELRKRALTEKVTAEEWARLLIFFAKHRGFKSNRKKASGDADEGEMLKAIAANAEILKNYRTVGEMLCDNEKFRKRKRNRDGAYNFTVSRAMLMEEIHTLFEIQRNLGQKFADEKLEEEYVILFAAQRKFDEGPGENSPYAGNQIEKMIGSCTLEGKKEKRAPKASYAFMAFNLWQKINHLKVNRRGSERFLTEEERRRIADLAWKKEKLTYGSLRKVLSLDPEDRFVGLRYDLKKGKAENLEEPVSEAEKRSFSWVKDYHSIRKALDKVEKNRILKLSHEQLDTIATAFSVYKNEETIEKYLEEGGIGKADGEALLERLSGFSKFGHLSLKACYKLLPFLEKGEVYSRACELAGYDFSKSSLENIDDIPNPVVKRSISQTLKVINAIILRYGNPVEVHIELARELARSFRDRKKMEKGMQENQAKNEKIRQRLISEFGVLRPKGMDIVKFKLCEEQNGECAYSQKHFDMEKLLKDPSYAEVDHIIPYSRSFDDSYNNKVLVLTKENREKRNRIPMEYLADAPERKNRFIHWVKSTIRNSRKRENLLRTDYTATTENEWKRRNLQDTQYISKYLYNYLRHHLVLAKGYTERKRRIIPVNGAVTAYFRKRLGINKIRENGDLHHAVDAVIIACATQGIVNKVSRYSKSRELWDYEVDMETGEVLQKKNKNTKDVFPEPWLNFRYELEQKVRVRPLDIPETADITEMEEPFVSHMPNRKIHGPAHKETIRSGRLKEEGYTISKTALIDLKLTEDKEEIKGYYNKESDRLLYEALKKQLQRYGGKAKEAFKEPFHKPKADGTPGPIVNKVKIMEKSTMLIPVNGGKGLASNGNMVRIDVFRAEEKGKKKYYFIPVYVADTVKEELPNRAVLAHKPYEAWKIMKEENFIFSLYPNDLIFVDAGKEIPFKAALKGSTLDPEKKASRFLMYYKGADIATGSISGVNHDETYKARGVGIQSLREIKKCCIDVLGNISFASKEKRQTFRSGGSSIVRVTYNVEQEVEISNKFNKDVDIMKPEEYDDYIDDLMFALNEKLPEYAEISCVINDNTGEVLFEGGSGGSPKKKRKV

SEQ ID NO: 483 - DNA, 10943 bp, Artificial Sequence
  Description of Artificial Sequence: Synthetic polynucleotide
  Category: Plasmid
  Description: pET21-CAT (H193Y)-sgRNA-TadA-nSpCas9 (D10A)
gaaataattttgtttaactttaagaaggagatataccatgggcagcagtcatcatcatcaccatcacatgtctgaagtcgaatttagccacgaatactggatgcgtcacgcgctgacgctggcgaaacgtgcctgggatgagcgggaagtgccggtcggcgcggtattagtgcataacaatcgggtaatcggcgaaggctggaaccgcccgattggtcgccatgatcccaccgcacatgcagaaatcatggccctgcggcagggtggtctggtgatgcaaaattatcgtctgatcgacgccacgttgtatgtcacgcttgaaccatgtgtaatgtgtgccggagcgatgatccacagtcgcattggtcgcgtggtctttggtgcgcgtgacgcgaaaactggcgctgcgggatctttaatggatgtgctgcatcatccgggtatgaatcaccgagtggaaattacggaaggaatactggcggatgagtgcgcggcgttgctcagtgacttctttcgcatgcgccgccaggaaattaaagcgcagaaaaaagcgcaatcctcgacggattcaggcgggtcgtcgggaggaagcagtggcagcgagactcccggaacttcggagagcgctacaccagaaagtagtggaggcagctctggtgggtccatggataagaaatactcaataggactggcgattggcacaaatagcgtcggatgggctgtgatcactgatgaatataaggttccttctaaaaagttcaaggttctgggaaatacagaccgccacagtatcaaaaaaaatcttataggggctcttctgtttgacagtggagagacagccgaagctactagactcaaacggacagctaggagaaggtatacaagacggaagaataggatttgttatctccaggagattttttcaaatgagatggccaaagtggatgatagtttctttcatagacttgaagagtcttttttggtggaagaagacaagaagcatgaaagacatcctatttttggaaatatagtggatgaagttgcttatcacgagaaatatccaactatctatcatctgagaaaaaaattggtggattctactgataaagccgatttgcgcctgatctatttggccctggcccacatgattaagtttagaggtcattttttgattgagggcgatctgaatcctgataatagtgatgtggacaaactgtttatccagttggtgcaaacctacaatcaactgtttgaagaaaaccctattaacgcaagtggagtggatgctaaagccattctttctgcaagattgagtaaatcaagaagactggaaaatctcattgctcagctccccggtgagaagaaaaatggcctgtttgggaatctcattgctttgtcattgggtttgacccctaattttaaatcaaattttgatttggcagaagatgctaaactccagctttcaaaagatacttacgatgatgatctggataatctgttggctcaaattggagatcaatatgctgatttgtttttggcagctaagaatctgtcagatgctattctgctttcagacatcctgagagtgaatactgaaataactaaggctcccctgtcagcttcaatgattaaacgctacgatgaacatcatcaagacttgactcttctgaaagccctggttagacaacaacttccagaaaagtataaagaaatcttttttgatcaatcaaaaaacggatatgcaggttatattgatggcggcgcaagccaagaagaattttataaatttatcaaaccaattctggaaaaaatggatggtactgaggaactgttggtgaaactgaatagagaagatttgctgcgcaagcaacggacctttgacaacggctctattccccatcaaattcacttgggtgagctgcatgctattttgagaagacaagaagacttttatccatttctgaaagacaatagagagaagattgaaaaaatcttgacttttaggattccttattatgttggtccattggccagaggcaatagtaggtttgcatggatgactcggaagtctgaagaaacaattaccccatggaattttgaagaagttgtcgataaaggtgcttcagctcaatcatttattgaacgcatgacaaactttgataaaaatcttccaaatgaaaaagtgctgccaaaacatagtttgctttatgagtattttaccgtttataacgaattgacaaaggtcaaatatgttactgaaggaatgagaaaaccagcatttctttcaggtgaacagaagaaagccattgttgatctgctcttcaaaacaaataggaaagtgaccgttaagcaactgaaagaagattatttcaaaaaaatagaatgttttgatagtgttgaaatttcaggagttgaagatagatttaatgcttcactgggtacataccatgatttgctgaaaattattaaagataaagattttttggataatgaagaaaatgaagacatcctggaggatattgttctgacattgaccctgtttgaagatagggagatgattgaggaaagacttaaaacatacgctcacctctttgatgataaggtgatgaaacagcttaaaagacgcagatatactggttggggaaggttgtccagaaaattgattaatggtattagggataagcaatctggcaaaacaatactggattttttgaaatcagatggttttgccaatcgcaattttatgcagctcatccatgatgatagtttgacatttaaagaagacatccaaaaagcacaagtgtctggacaaggcgatagtctgcatgaacatattgcaaatctggctggtagccctgctattaaaaaaggtattctccagactgtgaaagttgttgatgaattggtcaaagtgatggggcggcataagccagaaaatatcgttattgaaatggcaagagaaaatcagacaactcaaaagggccagaaaaattccagagagaggatgaaaagaatcgaagaaggtatcaaagaactgggaagtcagattcttaaagagcatcctgttgaaaatactcaattgcaaaatgaaaagctctatctctattatctccaaaatggaagagatatgtatgtggaccaagaactggatattaataggctgagtgattatgatgtcgatcacattgttccacaaagtttccttaaagacgattcaatagacaataaggtcctgaccaggtctgataaaaatagaggtaaatccgataacgttccaagtgaagaagtggtcaaaaagatgaaaaactattggagacaacttctgaacgccaagctgatcactcaaaggaagtttgataatctgaccaaagctgaaagaggaggtttgagtgaacttgataaagctggttttatcaaacgccaattggttgaaactcgccaaatcactaagcatgtggcacaaattttggatagtcgcatgaatactaaatacgatgaaaatgataaacttattagagaggttaaagtgattaccctgaaatctaaactggtttctgacttcagaaaagatttccaattctataaagtgagagagattaacaattaccatcatgcccatgatgcctatctgaatgccgtcgttggaactgctttgattaagaaatatccaaaacttgaaagcgagtttgtctatggtgattataaagtttatgatgttaggaaaatgattgctaagtctgagcaagaaataggcaaagcaaccgcaaagtatttcttttactctaatatcatgaacttcttcaaaacagaaattacacttgcaaatggagagattcgcaaacgccctctgatcgaaactaatggggaaactggagaaattgtctgggataaagggagagattttgccacagtgcgcaaagtgttgtccatgccccaagtcaatatcgtcaagaaaacagaagtgcagacaggcggattctctaaggagtcaattctgccaaaaagaaattccgacaagctgattgctaggaaaaaagactgggacccaaaaaaatatggtggttttgatagtccaaccgtggcttattcagtcctggtggttgctaaggtggaaaaagggaaatccaagaagctgaaatccgttaaagagctgctggggatcacaattatggaaagaagttcctttgaaaaaaatcccattgactttctggaagctaaaggatataaggaagttaaaaaagacctgatcattaaactgcctaaatatagtctttttgagctggaaaacggtaggaaacggatgctggctagtgccggagaactgcaaaaaggaaatgagctggctctgccaagcaaatatgtgaattttctgtatctggctagtcattatgaaaagttgaagggtagtccagaagataacgaacaaaaacaattgtttgtggagcagcataagcattatctggatgagattattgagcaaatcagtgaattttctaagagagttattctggcagatgccaatctggataaagttcttagtgcatataacaaacatagagacaaaccaataagagaacaagcagaaaatatcattcatctgtttaccttgaccaatcttggagcacccgctgcttttaaatactttgatacaacaattgataggaaaagatatacctctacaaaagaagttctggatgccactcttatccatcaatccatcactggtctttatgaaacacgcattgatttgagtcagctgggaggtgacggctctggcgggtctcccaagaagaagaggaaagtctaagatccggctgctaacaaagcccgaaaggaagctgagttggctgctgccaccgctgagcaataactagcataaccccttggggcctctaaacgggtcttgaggggttttttgctgaaaggaggaactatatccggattggcgaatgggacgcgccctgtagcggcgcattaagcgcggcgggtgtggtggttacgcgcagcgtgaccgctacacttgccagcgccctagcgcccgctcctttcgctttcttcccttcctttctcgccacgttcgccggctttccccgtcaagctctaaatcgggggctccctttagggttccgatttagtgctttacggcacctcgaccccaaaaaacttgattagggtgatggttcacgtagtgggccatcgccctgatagacggtttttcgccctttgacgttggagtccacgttctttaatagtggactcttgttccaaactggaacaacactcaaccctatctcggtctattcttttgatttataagggattttgccgatttcggcctattggttaaaaaatgagctgatttaacaaaaatttaacgcgaattttaacaaaatattaacgcttacaatttaggtggcacttttcggggaaatgtgcgcggaacccctatttgtttatttttctaaatacattcaaatatgtatccgctcatgagacaataaccctgataaatgcttcaataatattgaaaaaggaagagtatgagtattcaacatttccgtgtcgcccttattcccttttttgcggcattttgccttcctgtttttgctcacccagaaacgctggtgaaagtaaaagatgctgaagatcagttgggtgcacgagtgggttacatcgaactggatctcaacagcggtaagatccttgagagttttcgccccgaagaacgttttccaatgatgagcacttttaaagttctgctatgtggcgcggtattatcccgtattgacgccgggcaagagcaactcggtcgccgcatacactattctcagaatgacttggttgagtactcaccagtcacagaaaagcatcttacggatggcatgacagtaagagaattatgcagtgctgccataaccatgagtgataacactgcggccaacttacttctgacaacgatcggaggaccgaaggagctaaccgcttttttgcacaacatgggggatcatgtaactcgccttgatcgttgggaaccggagctgaatgaagccataccaaacgacgagcgtgacaccacgatgcctgcagcaatggcaacaacgttgcgcaaactattaactggcgaactacttactctagcttcccggcaacaattaatagactggatggaggcggataaagttgcaggaccacttctgcgctcggcccttccggctggctggtttattgctgataaatctggagccggtgagcgtgggtctcgcggtatcattgcagcactggggccagatggtaagccctcccgtatcgtagttatctacacgacggggagtcaggcaactatggatgaacgaaatagacagatcgctgagataggtgcctcactgattaagcattggtaactgtcagaccaagtttactcatatatactttagattgatttaaaacttcatttttaatttaaaaggatctaggtgaagatcctttttgataatctcatgaccaaaatcccttaacgtgagttttcgttccactgagcgtcagaccccgtagaaaagatcaaaggatcttcttgagatcctttttttctgcgcgtaatctgctgcttgcaaacaaaaaaaccaccgctaccagcggtggtttgtttgccggatcaagagctaccaactctttttccgaaggtaactggcttcagcagagcgcagataccaaatactgtccttctagtgtagccgtagttaggccaccacttcaagaactctgtagcaccgcctacatacctcgctctgctaatcctgttaccagtggctgctgccagtggcgataagtcgtgtcttaccgggttggactcaagacgatagttaccggataaggcgcagcggtcgggctgaacggggggttcgtgcacacagcccagcttggagcgaacgacctacaccgaactgagatacctacagcgtgagctatgagaaagcgccacgcttcccgaagggagaaaggcggacaggtatccggtaagcggcagggtcggaacaggagagcgcacgagggagcttccagggggaaacgcctggtatctttatagtcctgtcgggtttcgccacctctgacttgagcgtcgatttttgtgatgctcgtcaggggggcggagcctatggaaaaacgccagcaacgcggcctttttacggttcctggccttttgctggccttttgctcacatgttctttcctgcgttatcccctgattctgtggataaccgtattaccgcctttgagtgagctgataccgctcgccgcagccgaacgaccgagcgcagcgagtcagtgagcgaggaagcggaagagcgcctgatgcggtattttctccttacgcatctgtgcggtatttcacaccgcaatggtgcactctcagtacaatctgctctgatgccgcatagttaagccagtatacactccgctatcgctacgtgactgggtcatggctgcgccccgacacccgccaacacccgctgacgcgccctgacgggcttgtctgctcccggcatccgcttacagacaagctgtgaccgtctccgggagctgcatgtgtcagaggttttcaccgtcatcaccgaaacgcgcgaggcagctgcggtaaagctcatcagcgtggtcgtgaagcgattcacagatgtctgcctgttcatccgcgtccagctcgttgagtttctccagaagcgttaatgtctggcttctgataaagcgggccatgttaagggcggttttttcctgtttggtcactgatgcctccgtgtaagggggatttctgttcatgggggtaatgataccgatgaaacgagagaggatgctcacgatacgggttactgatgatgaacatgcccggttactggaacgttgtgagggtaaacaactggcggtatggatgcggcgggaccagagaaaaatcactcagggtcaatgccagcgcttcgttaatacagatgtaggtgttccacagggtagccagcagcatcctgcgatgcagatccggaacataatggtgcagggcgctgacttccgcgtttccagactttacgaaacacggaaaccgaagaccattcatgttgttgctcaggtcgcagacgttttgcagcagcagtcgcttcacgttcgctcgcgtatcggtgattcattctgctaaccagtaaggcaaccccgccagcctagccgggtcctcaacgacaggagcacgatcatgcgcacccgtggggccgccatgccggcgataatggcctgcttctcgccgaaacgtttggtggcgggaccagtgacgaaggcttgagcgagggcgtgcaagattccgaataccgcaagcgacaggccgatcatcgtcgcgctccagcgaaagcggtcctcgccgaaaatgacccagagcgctgccggcacctgtcctacgagttgcatgataaagaagacagtcataagtgcggcgacgatagtcatgccccgcgcccaccggaaggagctgactgggttgaaggctctcaagggcatcggtcgagatcccggtgcctaatgagtgagctaacttacattaattgcgttgcgctcactgcccgctttccagtcgggaaacctgtcgtgccagctgcattaatgaatcggccaacgcgcggggagaggcggtttgcgtattgggcgccagggtggtttttcttttcaccagtgagacgggcaacagctgattgcccttcaccgcctggccctgagagagttgcagcaagcggtccacgctggtttgccccagcaggcgaaaatcctgtttgatggtggttaacggcgggatataacatgagctgtcttcggtatcgtcgtatcccactaccgagatatccgcaccaacgcgcagcccggactcggtaatggcgcgcattgcgcccagcgccatctgatcgttggcaaccagcatcgcagtgggaacgatgccctcattcagcatttgcatggtttgttgaaaaccggacatggcactccagtcgccttcccgttccgctatcggctgaatttgattgcgagtgagatatttatgccagccagccagacgcagacgcgccgagacagaacttaatgggcccgctaacagcgcgatttgctggtgacccaatgcgaccagatgctccacgcccagtcgcgtaccgtcttcatgggagaaaataatactgttgatgggtgtctggtcagagacatcaagaaataacgccggaacattagtgcaggcagcttccacagcaatggcatcctggtcatccagcggatagttaatgatcagcccactgacgcgttgcgcgagaagattgtgcaccgccgctttacaggcttcgacgccgcttcgttctaccatcgacaccaccacgctggcacccagttgatcggcgcgagatttaatcgccgcgacaatttgcgacggcgcgtgcagggccagactggaggtggcaacgccaatcagcaacgactgtttgcccgccagttgttgtgccacgcggttgggaatgtaattcagctccgccatcgccgcttccactttttcccgcgttttcgcagaaacgtggctggcctggttcaccacgcgggaaacggtctgataagagacaccggcatactctgcgacatcgtataacgttactggtttcacattcaccaccctgaattgactctcttccgggcgctatcatgccataccgcgaaaggttttgcgccattcgatggtgtccgggatctcgacgctctcccttatgcgactcctgcattaggaagcagcccagtagtaggttgaggccgttgagcaccgccgccgcaaggaatggtttaattaatttgatcggcacgtaagaggttccaactttcaccataatgaaataagatcactaccgggcgtattttttgagttatcgagattttcaggagctaaggaagctaaaatggagaaaaaaatcactggatataccaccgttgatatatcccaatggcatcgtaaagaacattttgaggcatttcagtcagttgctcaatgtacctataaccagaccgttcagctggatattacggcctttttaaagaccgtaaagaaaaataagcacaagttttatccggcctttattcacattcttgcccgcctgatgaatgctcatccggaattccgtatggcaatgaaagacggtgagctggtgatatgggatagtgttcacccttgttacaccgttttccatgagcaaactgaaacgttttcatcgctctggagtgaataccacgacgatttccggcagtttctacacatatattcgcaagatgtggcgtgttacggtgaaaacctggcctatttccctaaagggtttattgagaatatgttttttgtctcagccaatccctgggtgagtttcaccagttttgatttaaacgtggccaatatggacaacttcttcgcccccgttttcaccatgggcaaatattatacgcaaggcgacaaggtgctgatgccgctggcgattcaggttcattatgccgtctgtgatggcttccatgtcggcagaatgcttaatgaattacaacagtactgcgatgagtggcagggcggggcgtaatttttttaaggcagttattggtgcccttaaacgcctggtgctacgcctgaataagtgaagcatgcaaggagatggcgcccaacagtcccccggccacggggcctgccaccatacccacgccgaaacaagcgctcatgagcccgaagtggcgagcccgatcttccccatcggtgatgtcggcgatataggcgccagcaaccgcacctgtggcgccggtgatgccggccacgatgcgtccggcgtagaggatcgagatctcgatcccgcgaaattaatacgactcactataggggaattgtgagcggataacaattcccctctaggatcc

SEQ ID NO: 484 - DNA, 8520 bp, Artificial Sequence
  Description of Artificial Sequence: Synthetic polynucleotide
  Category: Plasmid
  Description: pET21-sgRNA-TadA (ABE8.17m)-nMG34-1 (D10A)
gaaataattttgtttaactttaagaaggagatataccatgggcagcagtcatcatcatcaccatcactccgaggttgaatttagtcatgaatattggatgcgccacgcgctgacgttagccaaacgtgctcgtgatgagcgcgaagttccagtcggggccgtcttggtccttaacaatcgtgtcattggcgaggggtggaaccgcgctattgggctgcacgatccaacagcgcatgctgagattatggccttgcgtcaaggagggttagtaatgcaaaactaccgtcttattgatgctacgttatactctacattcgaaccctgtgtaatgtgtgcaggagcgatgatccacagtcgtattggccgcgtagtatttggtgtacgcaatgctaaaactggagccgccggatcgttgatggatgtcttgcattaccctggaatgaaccatcgtgtagagatcactgaaggcatccttgccgatgagtgtgcggctttgctttgctatttcttccgtatgccacgtcgtgtttttaacgcccaaaaaaaggctcaatccagtaccgattcaggcgggtcgtcgggaggaagcagtggcagcgagactcccggaacttcggagagcgctacaccagaaagtagtggaggcagctctggtgggtccatggagcgcgagctggtgctggggatcgcgtatggtggtaagtacacgggcttggcggtggtggatcgccgccacaaccaagtgctgtacgcgaatcgtcttaaaatgcgtgatgacgtggcaggcatcttgaaggaccgtcgcaaacagcgcgggattcgtcgcacggcccagacgaagaagaaacgccttcgcgagctgaagaattacctgaagagcatcgggtacaatgagtcgacggccaccttcgagaccgtgtattcactggcgcacaagcgtggttacgactacgcagacatgccagaggagaaaaccagtgaggagattgaagcgatggacgttgaggaacgtaagcaatgggagaaggaaaagcaagagtgggaagaaactaagcgcaactctcgccatcgcaaagaggtagttaaggacgtacacaaggcgatgatcgagggccgtgccacggaagaacaaattaagcgtgtggagcgcatcttcaacaagcaatatcgcccgaagcgttttaacaaccgcatcttgaccaagtgcaaagtggaagactgtggtgtgaacactcctttgcgtaagaacgtacgcgacctgctgattgagaacattgttcgtttctttccgattgagcagagcgagaaagacaacctgaaggacgccgtattagacaagaatcgtcgcgaagaggtgaagtccttctttcgcaagcacaaaaccgacgagcacatccgtaaacaagtgtacgacattgccgacaataaactgagcgggcgtactgtattctgcaaggagcacattctggagcacacggaacactccaaggaagagcgtaaagtctttcgcctggcaccgagtctgaagacgaagattgaaaacgtgctggcagtaatcaaggatgaaattctccctaagttcacggtgaacaaagtagtgatggaatcaaataacttcgacatcgccgcgaagacccaaggtaagaagcgtctcgccaaggaagagtacggcaagggcccgcgtgagggtaaggaaacgcgcaaagaggcgctgctgcgcgagaccgacgggcgctgcatttattgcggcaagagcatcgatatttcgaacgcacacgacgatcacatcttccctcgtaaagcgggcggattgaacattttcgcgaacctcgtggcctgctgtgcggtgtgcaacgaaaacaagaagggccgcacgcctctggagtcgggcatttcaccaaagccagagattattgcatttatgaagaacgacctgaagaagaaaatcttggaagatgctcgcaacattaacaccgtcgacttcaacaagtatatgagccacgcttcgattgggtggcgttacatgcgcgatcgccttcgcgaatcggcaggtaacaagaaactgccgatcgaacgccaaagtggtatttatacggcctactttcgtcgctggtggggtttcaagaaagagcgcggtaatactttgcaccacgctctggacgcggtgattttggcctcgcgtaagggctactcagacgacggcttagtagacatgactttaaaacccaagtacaataagggcggcgaattcgatccggagaagcacttaccggagcctatcgagttcaagatggacaaggggtcacgcggtagcgccctgcacgaccgtaatccgttgagttacaagaagggtatcatcactcgtcgcttcatggtcactgaaatcgaatgtggcaaggaagatgacgtgatctctgaaacctaccgcgagaagttgaaggaagcgttcaagcgcttcgacaccaagaagggcaagtgcctgaccgataaagaagccaaagaggcggggttctgtatcaagaagaacgagctggtgatgtcgctgaagtgttcaatcaaggggactggcccgggccaaatgattcgcattaacaacaacgtgttcaaaaccaacgtacacaacgtaggagttgacgtctacctggacgagaagggcaagaagaaggcgtacgaacgcaagaacccacgcttatcgaagcattttattgagccgccgccacaaccgaacggccgcgtctctttcacactgaagcgtcgcgacatggtgactgtagagggagaggatgccatttaccgcattaagaagttgggtacttccccgaccatcgaggcggtggtggggagcgacggtaagacgcgcacagtatcggcaacgaaattgaccaaggccaatagcgccgagctcgagggctctggcgggtctcccaagaagaagaggaaagtctaagatccggctgctaacaaagcccgaaaggaagctgagttggctgctgccaccgctgagcaataactagcataaccccttggggcctctaaacgggtcttgaggggttttttgctgaaaggaggaactatatccggattggcgaatgggacgcgccctgtagcggcgcattaagcgcggcgggtgtggtggttacgcgcagcgtgaccgctacacttgccagcgccctagcgcccgctcctttcgctttcttcccttcctttctcgccacgttcgccggctttccccgtcaagctctaaatcgggggctccctttagggttccgatttagtgctttacggcacctcgaccccaaaaaacttgattagggtgatggttcacgtagtgggccatcgccctgatagacggtttttcgccctttgacgttggagtccacgttctttaatagtggactcttgttccaaactggaacaacactcaaccctatctcggtctattcttttgatttataagggattttgccgatttcggcctattggttaaaaaatgagctgatttaacaaaaatttaacgcgaattttaacaaaatattaacgcttacaatttaggtggcacttttcggggaaatgtgcgcggaacccctatttgtttatttttctaaatacattcaaatatgtatccgctcatgagacaataaccctgataaatgcttcaataatattgaaaaaggaagagtatgagtattcaacatttccgtgtcgcccttattcccttttttgcggcattttgccttcctgtttttgctcacccagaaacgctggtgaaagtaaaagatgctgaagatcagttgggtgcacgagtgggttacatcgaactggatctcaacagcggtaagatccttgagagttttcgccccgaagaacgttttccaatgatgagcacttttaaagttctgctatgtggcgcggtattatcccgtattgacgccgggcaagagcaactcggtcgccgcatacactattctcagaatgacttggttgagtactcaccagtcacagaaaagcatcttacggatggcatgacagtaagagaattatgcagtgctgccataaccatgagtgataacactgcggccaacttacttctgacaacgatcggaggaccgaaggagctaaccgcttttttgcacaacatgggggatcatgtaactcgccttgatcgttgggaaccggagctgaatgaagccataccaaacgacgagcgtgacaccacgatgcctgcagcaatggcaacaacgttgcgcaaactattaactggcgaactacttactctagcttcccggcaacaattaatagactggatggaggcggataaagttgcaggaccacttctgcgctcggcccttccggctggctggtttattgctgataaatctggagccggtgagcgtgggtctcgcggtatcattgcagcactggggccagatggtaagccctcccgtatcgtagttatctacacgacggggagtcaggcaactatggatgaacgaaatagacagatcgctgagataggtgcctcactgattaagcattggtaactgtcagaccaagtttactcatatatactttagattgatttaaaacttcatttttaatttaaaaggatctaggtgaagatcctttttgataatctcatgaccaaaatcccttaacgtgagttttcgttccactgagcgtcagaccccgtagaaaagatcaaaggatcttcttgagatcctttttttctgcgcgtaatctgctgcttgcaaacaaaaaaaccaccgctaccagcggtggtttgtttgccggatcaagagctaccaactctttttccgaaggtaactggcttcagcagagcgcagataccaaatactgtccttctagtgtagccgtagttaggccaccacttcaagaactctgtagcaccgcctacatacctcgctctgctaatcctgttaccagtggctgctgccagtggcgataagtcgtgtcttaccgggttggactcaagacgatagttaccggataaggcgcagcggtcgggctgaacggggggttcgtgcacacagcccagcttggagcgaacgacctacaccgaactgagatacctacagcgtgagctatgagaaagcgccacgcttcccgaagggagaaaggcggacaggtatccggtaagcggcagggtcggaacaggagagcgcacgagggagcttccagggggaaacgcctggtatctttatagtcctgtcgggtttcgccacctctgacttgagcgtcgatttttgtgatgctcgtcaggggggcggagcctatggaaaaacgccagcaacgcggcctttttacggttcctggccttttgctggccttttgctcacatgttctttcctgcgttatcccctgattctgtggataaccgtattaccgcctttgagtgagctgataccgctcgccgcagccgaacgaccgagcgcagcgagtcagtgagcgaggaagcggaagagcgcctgatgcggtattttctccttacgcatctgtgcggtatttcacaccgcaatggtgcactctcagtacaatctgctctgatgccgcatagttaagccagtatacactccgctatcgctacgtgactgggtcatggctgcgccccgacacccgccaacacccgctgacgcgccctgacgggcttgtctgctcccggcatccgcttacagacaagctgtgaccgtctccgggagctgcatgtgtcagaggttttcaccgtcatcaccgaaacgcgcgaggcagctgcggtaaagctcatcagcgtggtcgtgaagcgattcacagatgtctgcctgttcatccgcgtccagctcgttgagtttctccagaagcgttaatgtctggcttctgataaagcgggccatgttaagggcggttttttcctgtttggtcactgatgcctccgtgtaagggggatttctgttcatgggggtaatgataccgatgaaacgagagaggatgctcacgatacgggttactgatgatgaacatgcccggttactggaacgttgtgagggtaaacaactggcggtatggatgcggcgggaccagagaaaaatcactcagggtcaatgccagcgcttcgttaatacagatgtaggtgttccacagggtagccagcagcatcctgcgatgcagatccggaacataatggtgcagggcgctgacttccgcgtttccagactttacgaaacacggaaaccgaagaccattcatgttgttgctcaggtcgcagacgttttgcagcagcagtcgcttcacgttcgctcgcgtatcggtgattcattctgctaaccagtaaggcaaccccgccagcctagccgggtcctcaacgacaggagcacgatcatgcgcacccgtggggccgccatgccggcgataatggcctgcttctcgccgaaacgtttggtggcgggaccagtgacgaaggcttgagcgagggcgtgcaagattccgaataccgcaagcgacaggccgatcatcgtcgcgctccagcgaaagcggtcctcgccgaaaatgacccagagcgctgccggcacctgtcctacgagttgcatgataaagaagacagtcataagtgcggcgacgatagtcatgccccgcgcccaccggaaggagctgactgggttgaaggctctcaagggcatcggtcgagatcccggtgcctaatgagtgagctaacttacattaattgcgttgcgctcactgcccgctttccagtcgggaaacctgtcgtgccagctgcattaatgaatcggccaacgcgcggggagaggcggtttgcgtattgggcgccagggtggtttttcttttcaccagtgagacgggcaacagctgattgcccttcaccgcctggccctgagagagttgcagcaagcggtccacgctggtttgccccagcaggcgaaaatcctgtttgatggtggttaacggcgggatataacatgagctgtcttcggtatcgtcgtatcccactaccgagatatccgcaccaacgcgcagcccggactcggtaatggcgcgcattgcgcccagcgccatctgatcgttggcaaccagcatcgcagtgggaacgatgccctcattcagcatttgcatggtttgttgaaaaccggacatggcactccagtcgccttcccgttccgctatcggctgaatttgattgcgagtgagatatttatgccagccagccagacgcagacgcgccgagacagaacttaatgggcccgctaacagcgcgatttgctggtgacccaatgcgaccagatgctccacgcccagtcgcgtaccgtcttcatgggagaaaataatactgttgatgggtgtctggtcagagacatcaagaaataacgccggaacattagtgcaggcagcttccacagcaatggcatcctggtcatccagcggatagttaatgatcagcccactgacgcgttgcgcgagaagattgtgcaccgccgctttacaggcttcgacgccgcttcgttctaccatcgacaccaccacgctggcacccagttgatcggcgcgagatttaatcgccgcgacaatttgcgacggcgcgtgcagggccagactggaggtggcaacgccaatcagcaacgactgtttgcccgccagttgttgtgccacgcggttgggaatgtaattcagctccgccatcgccgcttccactttttcccgcgttttcgcagaaacgtggctggcctggttcaccacgcgggaaacggtctgataagagacaccggcatactctgcgacatcgtataacgttactggtttcacattcaccaccctgaattgactctcttccgggcgctatcatgccataccgcgaaaggttttgcgccattcgatggtgtccgggatctcgacgctctcccttatgcgactcctgcattaggaagcagcccagtagtaggttgaggccgttgagcaccgccgccgcaaggaatggtttaattaattacggccagtcatgcataatccgcacgcatctggaataaggaagtgccattccgcctgaccttaatacgactcactatagtctttatggcagggtgaaacgcgttacagttaagaaattaattgtaaaacgcctatacagtgaagggatatacgcttgggtttgtccagcctgagcctctatgccagaaatggcgccttcatcgtgggttaggacatttaattttaaaaaaaaaccccgcttcggcggggtttttttttagcatgcaaggagatggcgcccaacagtcccccggccacggggcctgccaccatacccacgccgaaacaagcgctcatgagcccgaagtggcgagcccgatcttccccatcggtgatgtcggcgatataggcgccagcaaccgcacctgtggcgccggtgatgccggccacgatgcgtccggcgtagaggatcgagatctcgatcccgcgaaattaatacgactcactataggggaattgtgagcggataacaattcccctctaggatcc

SEQ ID NO: 485 - DNA, 8925 bp, Artificial Sequence
  Description of Artificial Sequence: Synthetic polynucleotide
  Category: Plasmid
  Description: pET21-sgRNA-rAPOBEC1-nMG34-1 (D10A)-UGI (PBS1)
atgggcagcagtcatcatcatcaccatcacatgtcgtctgagaccgggcctgttgccgtggaccctacccttcgccgccgtatcgaaccacacgagtttgaagtgttttttgacccacgcgaactgcgcaaagagacttgtttgctttacgagattaactggggaggccgtcactccatctggcgtcacacttcacaaaatactaataagcacgttgaggttaatttcattgagaaatttactacagagcgctacttctgtccgaatacacgttgcagcatcacctggtttctttcctggtccccgtgcggtgaatgttcacgtgccatcaccgaattcttatcgcgctaccctcacgtaactttgtttatctatattgcccgtttatatcaccatgcagaccctcgcaatcgtcagggcctgcgcgaccttatctcgagtggagtcaccatccaaattatgactgaacaggaatcggggtattgttggcgcaactttgtcaattattctccgagcaacgaggcacattggccgcgttacccacacttatgggtgcgcctttacgtgctggaattgtattgcatcattcttggtcttcccccatgtttgaatatccttcgccgcaaacagcctcagttgacgttttttacgattgctcttcagtcctgtcactaccaacgtcttcccccgcacatcctgtgggcgaccggtttgaaatcggggagtgaaacacccggcacatccgaaagtgcgacacctgaatctgccatggagcgcgagctggtgctggggatcgcgtatggtggtaagtacacgggcttggcggtggtggatcgccgccacaaccaagtgctgtacgcgaatcgtcttaaaatgcgtgatgacgtggcaggcatcttgaaggaccgtcgcaaacagcgcgggattcgtcgcacggcccagacgaagaagaaacgccttcgcgagctgaagaattacctgaagagcatcgggtacaatgagtcgacggccaccttcgagaccgtgtattcactggcgcacaagcgtggttacgactacgcagacatgccagaggagaaaaccagtgaggagattgaagcgatggacgttgaggaacgtaagcaatgggagaaggaaaagcaagagtgggaagaaactaagcgcaactctcgccatcgcaaagaggtagttaaggacgtacacaaggcgatgatcgagggccgtgccacggaagaacaaattaagcgtgtggagcgcatcttcaacaagcaatatcgcccgaagcgttttaacaaccgcatcttgaccaagtgcaaagtggaagactgtggtgtgaacactcctttgcgtaagaacgtacgcgacctgctgattgagaacattgttcgtttctttccgattgagcagagcgagaaagacaacctgaaggacgccgtattagacaagaatcgtcgcgaagaggtgaagtccttctttcgcaagcacaaaaccgacgagcacatccgtaaacaagtgtacgacattgccgacaataaactgagcgggcgtactgtattctgcaaggagcacattctggagcacacggaacactccaaggaagagcgtaaagtctttcgcctggcaccgagtctgaagacgaagattgaaaacgtgctggcagtaatcaaggatgaaattctccctaagttcacggtgaacaaagtagtgatggaatcaaataacttcgacatcgccgcgaagacccaaggtaagaagcgtctcgccaaggaagagtacggcaagggcccgcgtgagggtaaggaaacgcgcaaagaggcgctgctgcgcgagaccgacgggcgctgcatttattgcggcaagagcatcgatatttcgaacgcacacgacgatcacatcttccctcgtaaagcgggcggattgaacattttcgcgaacctcgtggcctgctgtgcggtgtgcaacgaaaacaagaagggccgcacgcctctggagtcgggcatttcaccaaagccagagattattgcatttatgaagaacgacctgaagaagaaaatcttggaagatgctcgcaacattaacaccgtcgacttcaacaagtatatgagccacgcttcgattgggtggcgttacatgcgcgatcgccttcgcgaatcggcaggtaacaagaaactgccgatcgaacgccaaagtggtatttatacggcctactttcgtcgctggtggggtttcaagaaagagcgcggtaatactttgcaccacgctctggacgcggtgattttggcctcgcgtaagggctactcagacgacggcttagtagacatgactttaaaacccaagtacaataagggcggcgaattcgatccggagaagcacttaccggagcctatcgagttcaagatggacaaggggtcacgcggtagcgccctgcacgaccgtaatccgttgagttacaagaagggtatcatcactcgtcgcttcatggtcactgaaatcgaatgtggcaaggaagatgacgtgatctctgaaacctaccgcgagaagttgaaggaagcgttcaagcgcttcgacaccaagaagggcaagtgcctgaccgataaagaagccaaagaggcggggttctgtatcaagaagaacgagctggtgatgtcgctgaagtgttcaatcaaggggactggcccgggccaaatgattcgcattaacaacaacgtgttcaaaaccaacgtacacaacgtaggagttgacgtctacctggacgagaagggcaagaagaaggcgtacgaacgcaagaacccacgcttatcgaagcattttattgagccgccgccacaaccgaacggccgcgtctctttcacactgaagcgtcgcgacatggtgactgtagagggagaggatgccatttaccgcattaagaagttgggtacttccccgaccatcgaggcggtggtggggagcgacggtaagacgcgcacagtatcggcaacgaaattgaccaaggccaatagcgccgagctcgaggggtctggtggttctaccaatctttcagatattattgaaaaagagacaggaaagcagttggtcattcaagagagtatcctgatgttaccggaggaagttgaggaggtaatcggaaataaacccgagagcgacattttagtccacactgcttatgacgagagtacggatgagaatgtgatgctgcttacgtcagatgcgcccgagtataagccgtgggccctggtcattcaggacagtaacggcgaaaacaagatcaaaatgctttctggtggttctcccaagaagaagaggaaagtctaagatccggctgctaacaaagcccgaaaggaagctgagttggctgctgccaccgctgagcaataactagcataaccccttggggcctctaaacgggtcttgaggggttttttgctgaaaggaggaactatatccggattggcgaatgggacgcgccctgtagcggcgcattaagcgcggcgggtgtggtggttacgcgcagcgtgaccgctacacttgccagcgccctagcgcccgctcctttcgctttcttcccttcctttctcgccacgttcgccggctttccccgtcaagctctaaatcgggggctccctttagggttccgatttagtgctttacggcacctcgaccccaaaaaacttgattagggtgatggttcacgtagtgggccatcgccctgatagacggtttttcgccctttgacgttggagtccacgttctttaatagtggactcttgttccaaactggaacaacactcaaccctatctcggtctattcttttgatttataagggattttgccgatttcggcctattggttaaaaaatgagctgatttaacaaaaatttaacgcgaattttaacaaaatattaacgcttacaatttaggtggcacttttcggggaaatgtgcgcggaacccctatttgtttatttttctaaatacattcaaatatgtatccgctcatgagacaataaccctgataaatgcttcaataatattgaaaaaggaagagtatgagtattcaacatttccgtgtcgcccttattcccttttttgcggcattttgccttcctgtttttgctcacccagaaacgctggtgaaagtaaaagatgctgaagatcagttgggtgcacgagtgggttacatcgaactggatctcaacagcggtaagatccttgagagttttcgccccgaagaacgttttccaatgatgagcacttttaaagttctgctatgtggcgcggtattatcccgtattgacgccgggcaagagcaactcggtcgccgcatacactattctcagaatgacttggttgagtactcaccagtcacagaaaagcatcttacggatggcatgacagtaagagaattatgcagtgctgccataaccatgagtgataacactgcggccaacttacttctgacaacgatcggaggaccgaaggagctaaccgcttttttgcacaacatgggggatcatgtaactcgccttgatcgttgggaaccggagctgaatgaagccataccaaacgacgagcgtgacaccacgatgcctgcagcaatggcaacaacgttgcgcaaactattaactggcgaactacttactctagcttcccggcaacaattaatagactggatggaggcggataaagttgcaggaccacttctgcgctcggcccttccggctggctggtttattgctgataaatctggagccggtgagcgtgggtctcgcggtatcattgcagcactggggccagatggtaagccctcccgtatcgtagttatctacacgacggggagtcaggcaactatggatgaacgaaatagacagatcgctgagataggtgcctcactgattaagcattggtaactgtcagaccaagtttactcatatatactttagattgatttaaaacttcatttttaatttaaaaggatctaggtgaagatcctttttgataatctcatgaccaaaatcccttaacgtgagttttcgttccactgagcgtcagaccccgtagaaaagatcaaaggatcttcttgagatcctttttttctgcgcgtaatctgctgcttgcaaacaaaaaaaccaccgctaccagcggtggtttgtttgccggatcaagagctaccaactctttttccgaaggtaactggcttcagcagagcgcagataccaaatactgtccttctagtgtagccgtagttaggccaccacttcaagaactctgtagcaccgcctacatacctcgctctgctaatcctgttaccagtggctgctgccagtggcgataagtcgtgtcttaccgggttggactcaagacgatagttaccggataaggcgcagcggtcgggctgaacggggggttcgtgcacacagcccagcttggagcgaacgacctacaccgaactgagatacctacagcgtgagctatgagaaagcgccacgcttcccgaagggagaaaggcggacaggtatccggtaagcggcagggtcggaacaggagagcgcacgagggagcttccagggggaaacgcctggtatctttatagtcctgtcgggtttcgccacctctgacttgagcgtcgatttttgtgatgctcgtcaggggggcggagcctatggaaaaacgccagcaacgcggcctttttacggttcctggccttttgctggccttttgctcacatgttctttcctgcgttatcccctgattctgtggataaccgtattaccgcctttgagtgagctgataccgctcgccgcagccgaacgaccgagcgcagcgagtcagtgagcgaggaagcggaagagcgcctgatgcggtattttctccttacgcatctgtgcggtatttcacaccgcaatggtgcactctcagtacaatctgctctgatgccgcatagttaagccagtatacactccgctatcgctacgtgactgggtcatggctgcgccccgacacccgccaacacccgctgacgcgccctgacgggcttgtctgctcccggcatccgcttacagacaagctgtgaccgtctccgggagctgcatgtgtcagaggttttcaccgtcatcaccgaaacgcgcgaggcagctgcggtaaagctcatcagcgtggtcgtgaagcgattcacagatgtctgcctgttcatccgcgtccagctcgttgagtttctccagaagcgttaatgtctggcttctgataaagcgggccatgttaagggcggttttttcctgtttggtcactgatgcctccgtgtaagggggatttctgttcatgggggtaatgataccgatgaaacgagagaggatgctcacgatacgggttactgatgatgaacatgcccggttactggaacgttgtgagggtaaacaactggcggtatggatgcggcgggaccagagaaaaatcactcagggtcaatgccagcgcttcgttaatacagatgtaggtgttccacagggtagccagcagcatcctgcgatgcagatccggaacataatggtgcagggcgctgacttccgcgtttccagactttacgaaacacggaaaccgaagaccattcatgttgttgctcaggtcgcagacgttttgcagcagcagtcgcttcacgttcgctcgcgtatcggtgattcattctgctaaccagtaaggcaaccccgccagcctagccgggtcctcaacgacaggagcacgatcatgcgcacccgtggggccgccatgccggcgataatggcctgcttctcgccgaaacgtttggtggcgggaccagtgacgaaggcttgagcgagggcgtgcaagattccgaataccgcaagcgacaggccgatcatcgtcgcgctccagcgaaagcggtcctcgccgaaaatgacccagagcgctgccggcacctgtcctacgagttgcatgataaagaagacagtcataagtgcggcgacgatagtcatgccccgcgcccaccggaaggagctgactgggttgaaggctctcaagggcatcggtcgagatcccggtgcctaatgagtgagctaacttacattaattgcgttgcgctcactgcccgctttccagtcgggaaacctgtcgtgccagctgcattaatgaatcggccaacgcgcggggagaggcggtttgcgtattgggcgccagggtggtttttcttttcaccagtgagacgggcaacagctgattgcccttcaccgcctggccctgagagagttgcagcaagcggtccacgctggtttgccccagcaggcgaaaatcctgtttgatggtggttaacggcgggatataacatgagctgtcttcggtatcgtcgtatcccactaccgagatatccgcaccaacgcgcagcccggactcggtaatggcgcgcattgcgcccagcgccatctgatcgttggcaaccagcatcgcagtgggaacgatgccctcattcagcatttgcatggtttgttgaaaaccggacatggcactccagtcgccttcccgttccgctatcggctgaatttgattgcgagtgagatatttatgccagccagccagacgcagacgcgccgagacagaacttaatgggcccgctaacagcgcgatttgctggtgacccaatgcgaccagatgctccacgcccagtcgcgtaccgtcttcatgggagaaaataatactgttgatgggtgtctggtcagagacatcaagaaataacgccggaacattagtgcaggcagcttccacagcaatggcatcctggtcatccagcggatagttaatgatcagcccactgacgcgttgcgcgagaagattgtgcaccgccgctttacaggcttcgacgccgcttcgttctaccatcgacaccaccacgctggcacccagttgatcggcgcgagatttaatcgccgcgacaatttgcgacggcgcgtgcagggccagactggaggtggcaacgccaatcagcaacgactgtttgcccgccagttgttgtgccacgcggttgggaatgtaattcagctccgccatcgccgcttccactttttcccgcgttttcgcagaaacgtggctggcctggttcaccacgcgggaaacggtctgataagagacaccggcatactctgcgacatcgtataacgttactggtttcacattcaccaccctgaattgactctcttccgggcgctatcatgccataccgcgaaaggttttgcgccattcgatggtgtccgggatctcgacgctctcccttatgcgactcctgcattaggaagcagcccagtagtaggttgaggccgttgagcaccgccgccgcaaggaatggtttaattaattacggccagtcatgcataatccgcacgcatctggaataaggaagtgccattccgcctgaccttaatacgactcactatagcgcgccggagaaaaccgcctcggttacagttaagaaattaattgtaaaacgcctatacagtgaagggatatacgcttgggtttgtccagcctgagcctctatgccagaaatggcgccttcatcgtgggttaggacatttaattttaaaaaaaaaccccgcttcggcggggtttttttttagcatgcaaggagatggcgcccaacagtcccccggccacggggcctgccaccatacccacgccgaaacaagcgctcatgagcccgaagtggcgagcccgatcttccccatcggtgatgtcggcgatataggcgccagcaaccgcacctgtggcgccggtgatgccggccacgatgcgtccggcgtagaggatcgagatctcgatcccgcgaaattaatacgactcactataggggaattgtgagcggataacaattcccctctaggatccgaaataattttgtttaactttaagaaggagatatacc

SEQ ID NO: 486 - DNA, 9519 bp, Artificial Sequence
  Description of Artificial Sequence: Synthetic polynucleotide
  Category: Plasmid
  Description: pET21-CAT (H193Y)-sgRNA-MG68-4 (D109N)-nMG34-1 (D10A)
ttaattaatttgatcggcacgtaagaggttccaactttcaccataatgaaataagatcactaccgggcgtattttttgagttatcgagattttcaggagctaaggaagctaaaatggagaaaaaaatcactggatataccaccgttgatatatcccaatggcatcgtaaagaacattttgaggcatttcagtcagttgctcaatgtacctataaccagaccgttcagctggatattacggcctttttaaagaccgtaaagaaaaataagcacaagttttatccggcctttattcacattcttgcccgcctgatgaatgctcatccggaattccgtatggcaatgaaagacggtgagctggtgatatgggatagtgttcacccttgttacaccgttttccatgagcaaactgaaacgttttcatcgctctggagtgaataccacgacgatttccggcagtttctacacatatattcgcaagatgtggcgtgttacggtgaaaacctggcctatttccctaaagggtttattgagaatatgttttttgtctcagccaatccctgggtgagtttcaccagttttgatttaaacgtggccaatatggacaacttcttcgcccccgttttcaccatgggcaaatattatacgcaaggcgacaaggtgctgatgccgctggcgattcaggttcattatgccgtctgtgatggcttccatgtcggcagaatgcttaatgaattacaacagtactgcgatgagtggcagggcggggcgtaatttttttaaggcagttattggtgcccttaaacgcctggtgctacgcctgaataagtgaagcatgcaaggagatggcgcccaacagtcccccggccacggggcctgccaccatacccacgccgaaacaagcgctcatgagcccgaagtggcgagcccgatcttccccatcggtgatgtcggcgatataggcgccagcaaccgcacctgtggcgccggtgatgccggccacgatgcgtccggcgtagaggatcgactcgagtgcggccgcaagcttgtcgacggagctcgaattcggatcctaatacgactcactatagtaatgaacctgaatcgccaggttacagttaagaaattaattgtaaaacgcctatacagtgaagggatatacgcttgggtttgtccagcctgagcctctatgccagaaatggcgccttcatcgtgggttaggacatttaattttaaaaaaaaaccccgcttcggcggggtttttttttagcatgcaaggagatggcgcccaacagtcccccggccacggggcctgccaccatacccacgccgaaacaagcgctcatgagcccgaagtggcgagcccgatcttccccatcggtgatgtcggcgatataggcgccagcaaccgcacctgtggcgccggtgatgccggccacgatgcgtccggcgtagaggatcgagatctcgatcccgcgaaattaatacgactcactataggggaattgtgagcggataacaattcccctctaggatccgaaataattttgtttaactttaagaaggagatataccccgcggatgactgattctcaaaatgatacagatgaatactggatgggagaggccctgaagttggcacaaaaggcatgggacgaaggagaggtgcccgtaggagccatcttggttcgtaagggcgaagttatcggtcatggctggaaccgtagcatcgggtcccatgacccctcggcgcatgctgaaattatggctattcgtgaagccggggtgcgtatcggtaattatcgcatgttggataccgtattatacgttacgctggagccgtgtgcaatgtgcgcaggggcacttgttcacgggcgtatttcacgcttggtctttggtgccgaaaaccccaagacaggggcgtgcgggtcagtcatggacattgctcgccaccctgctttgaaccaccaattacaagttgatggtggggtaatggcggctccttgtgcgcgtcttttatctgacttctttcgctggcgtcgcgctcagaaaaaggcggcccgtgataatagttcggggaacggtacctcaggcgggtcgtcgggaggaagcagtggcagcgagactcccggaacttcggagagcgctacaccagaaagtagtggaggcagctctggtgggtccatggagcgcgagctggtgctggggatcgcgtatggtggtaagtacacgggcttggcggtggtggatcgccgccacaaccaagtgctgtacgcgaatcgtcttaaaatgcgtgatgacgtggcaggcatcttgaaggaccgtcgcaaacagcgcgggattcgtcgcacggcccagacgaagaagaaacgccttcgcgagctgaagaattacctgaagagcatcgggtacaatgagtcgacggccaccttcgagaccgtgtattcactggcgcacaagcgtggttacgactacgcagacatgccagaggagaaaaccagtgaggagattgaagcgatggacgttgaggaacgtaagcaatgggagaaggaaaagcaagagtgggaagaaactaagcgcaactctcgccatcgcaaagaggtagttaaggacgtacacaaggcgatgatcgagggccgtgccacggaagaacaaattaagcgtgtggagcgcatcttcaacaagcaatatcgcccgaagcgttttaacaaccgcatcttgaccaagtgcaaagtggaagactgtggtgtgaacactcctttgcgtaagaacgtacgcgacctgctgattgagaacattgttcgtttctttccgattgagcagagcgagaaagacaacctgaaggacgccgtattagacaagaatcgtcgcgaagaggtgaagtccttctttcgcaagcacaaaaccgacgagcacatccgtaaacaagtgtacgacattgccgacaataaactgagcgggcgtactgtattctgcaaggagcacattctggagcacacggaacactccaaggaagagcgtaaagtctttcgcctggcaccgagtctgaagacgaagattgaaaacgtgctggcagtaatcaaggatgaaattctccctaagttcacggtgaacaaagtagtgatggaatcaaataacttcgacatcgccgcgaagacccaaggtaagaagcgtctcgccaaggaagagtacggcaagggcccgcgtgagggtaaggaaacgcgcaaagaggcgctgctgcgcgagaccgacgggcgctgcatttattgcggcaagagcatcgatatttcgaacgcacacgacgatcacatcttccctcgtaaagcgggcggattgaacattttcgcgaacctcgtggcctgctgtgcggtgtgcaacgaaaacaagaagggccgcacgcctctggagtcgggcatttcaccaaagccagagattattgcatttatgaagaacgacctgaagaagaaaatcttggaagatgctcgcaacattaacaccgtcgacttcaacaagtatatgagccacgcttcgattgggtggcgttacatgcgcgatcgccttcgcgaatcggcaggtaacaagaaactgccgatcgaacgccaaagtggtatttatacggcctactttcgtcgctggtggggtttcaagaaagagcgcggtaatactttgcaccacgctctggacgcggtgattttggcctcgcgtaagggctactcagacgacggcttagtagacatgactttaaaacccaagtacaataagggcggcgaattcgatccggagaagcacttaccggagcctatcgagttcaagatggacaaggggtcacgcggtagcgccctgcacgaccgtaatccgttgagttacaagaagggtatcatcactcgtcgcttcatggtcactgaaatcgaatgtggcaaggaagatgacgtgatctctgaaacctaccgcgagaagttgaaggaagcgttcaagcgcttcgacaccaagaagggcaagtgcctgaccgataaagaagccaaagaggcggggttctgtatcaagaagaacgagctggtgatgtcgctgaagtgttcaatcaaggggactggcccgggccaaatgattcgcattaacaacaacgtgttcaaaaccaacgtacacaacgtaggagttgacgtctacctggacgagaagggcaagaagaaggcgtacgaacgcaagaacccacgcttatcgaagcattttattgagccgccgccacaaccgaacggccgcgtctctttcacactgaagcgtcgcgacatggtgactgtagagggagaggatgccatttaccgcattaagaagttgggtacttccccgaccatcgaggcggtggtggggagcgacggtaagacgcgcacagtatcggcaacgaaattgaccaaggccaatagcgccgagctcgagggctctggcgggtctcccaagaagaagaggaaagtctaagatccggctgctaacaaagcccgaaaggaagctgagttggctgctgccaccgctgagcaataactagcataaccccttggggcctctaaacgggtcttgaggggttttttgctgaaaggaggaactatatccggattggcgaatgggacgcgccctgtagcggcgcattaagcgcggcgggtgtggtggttacgcgcagcgtgaccgctacacttgccagcgccctagcgcccgctcctttcgctttcttcccttcctttctcgccacgttcgccggctttccccgtcaagctctaaatcgggggctccctttagggttccgatttagtgctttacggcacctcgaccccaaaaaacttgattagggtgatggttcacgtagtgggccatcgccctgatagacggtttttcgccctttgacgttggagtccacgttctttaatagtggactcttgttccaaactggaacaacactcaaccctatctcggtctattcttttgatttataagggattttgccgatttcggcctattggttaaaaaatgagctgatttaacaaaaatttaacgcgaattttaacaaaatattaacgcttacaatttaggtggcacttttcggggaaatgtgcgcggaacccctatttgtttatttttctaaatacattcaaatatgtatccgctcatgagacaataaccctgataaatgcttcaataatattgaaaaaggaagagtatgagtattcaacatttccgtgtcgcccttattcccttttttgcggcattttgccttcctgtttttgctcacccagaaacgctggtgaaagtaaaagatgctgaagatcagttgggtgcacgagtgggttacatcgaactggatctcaacagcggtaagatccttgagagttttcgccccgaagaacgttttccaatgatgagcacttttaaagttctgctatgtggcgcggtattatcccgtattgacgccgggcaagagcaactcggtcgccgcatacactattctcagaatgacttggttgagtactcaccagtcacagaaaagcatcttacggatggcatgacagtaagagaattatgcagtgctgccataaccatgagtgataacactgcggccaacttacttctgacaacgatcggaggaccgaaggagctaaccgcttttttgcacaacatgggggatcatgtaactcgccttgatcgttgggaaccggagctgaatgaagccataccaaacgacgagcgtgacaccacgatgcctgcagcaatggcaacaacgttgcgcaaactattaactggcgaactacttactctagcttcccggcaacaattaatagactggatggaggcggataaagttgcaggaccacttctgcgctcggcccttccggctggctggtttattgctgataaatctggagccggtgagcgtgggtctcgcggtatcattgcagcactggggccagatggtaagccctcccgtatcgtagttatctacacgacggggagtcaggcaactatggatgaacgaaatagacagatcgctgagataggtgcctcactgattaagcattggtaactgtcagaccaagtttactcatatatactttagattgatttaaaacttcatttttaatttaaaaggatctaggtgaagatcctttttgataatctcatgaccaaaatcccttaacgtgagttttcgttccactgagcgtcagaccccgtagaaaagatcaaaggatcttcttgagatcctttttttctgcgcgtaatctgctgcttgcaaacaaaaaaaccaccgctaccagcggtggtttgtttgccggatcaagagctaccaactctttttccgaaggtaactggcttcagcagagcgcagataccaaatactgtccttctagtgtagccgtagttaggccaccacttcaagaactctgtagcaccgcctacatacctcgctctgctaatcctgttaccagtggctgctgccagtggcgataagtcgtgtcttaccgggttggactcaagacgatagttaccggataaggcgcagcggtcgggctgaacggggggttcgtgcacacagcccagcttggagcgaacgacctacaccgaactgagatacctacagcgtgagctatgagaaagcgccacgcttcccgaagggagaaaggcggacaggtatccggtaagcggcagggtcggaacaggagagcgcacgagggagcttccagggggaaacgcctggtatctttatagtcctgtcgggtttcgccacctctgacttgagcgtcgatttttgtgatgctcgtcaggggggcggagcctatggaaaaacgccagcaacgcggcctttttacggttcctggccttttgctggccttttgctcacatgttctttcctgcgttatcccctgattctgtggataaccgtattaccgcctttgagtgagctgataccgctcgccgcagccgaacgaccgagcgcagcgagtcagtgagcgaggaagcggaagagcgcctgatgcggtattttctccttacgcatctgtgcggtatttcacaccgcaatggtgcactctcagtacaatctgctctgatgccgcatagttaagccagtatacactccgctatcgctacgtgactgggtcatggctgcgccccgacacccgccaacacccgctgacgcgccctgacgggcttgtctgctcccggcatccgcttacagacaagctgtgaccgtctccgggagctgcatgtgtcagaggttttcaccgtcatcaccgaaacgcgcgaggcagctgcggtaaagctcatcagcgtggtcgtgaagcgattcacagatgtctgcctgttcatccgcgtccagctcgttgagtttctccagaagcgttaatgtctggcttctgataaagcgggccatgttaagggcggttttttcctgtttggtcactgatgcctccgtgtaagggggatttctgttcatgggggtaatgataccgatgaaacgagagaggatgctcacgatacgggttactgatgatgaacatgcccggttactggaacgttgtgagggtaaacaactggcggtatggatgcggcgggaccagagaaaaatcactcagggtcaatgccagcgcttcgttaatacagatgtaggtgttccacagggtagccagcagcatcctgcgatgcagatccggaacataatggtgcagggcgctgacttccgcgtttccagactttacgaaacacggaaaccgaagaccattcatgttgttgctcaggtcgcagacgttttgcagcagcagtcgcttcacgttcgctcgcgtatcggtgattcattctgctaaccagtaaggcaaccccgccagcctagccgggtcctcaacgacaggagcacgatcatgcgcacccgtggggccgccatgccggcgataatggcctgcttctcgccgaaacgtttggtggcgggaccagtgacgaaggcttgagcgagggcgtgcaagattccgaataccgcaagcgacaggccgatcatcgtcgcgctccagcgaaagcggtcctcgccgaaaatgacccagagcgctgccggcacctgtcctacgagttgcatgataaagaagacagtcataagtgcggcgacgatagtcatgccccgcgcccaccggaaggagctgactgggttgaaggctctcaagggcatcggtcgagatcccggtgcctaatgagtgagctaacttacattaattgcgttgcgctcactgcccgctttccagtcgggaaacctgtcgtgccagctgcattaatgaatcggccaacgcgcggggagaggcggtttgcgtattgggcgccagggtggtttttcttttcaccagtgagacgggcaacagctgattgcccttcaccgcctggccctgagagagttgcagcaagcggtccacgctggtttgccccagcaggcgaaaatcctgtttgatggtggttaacggcgggatataacatgagctgtcttcggtatcgtcgtatcccactaccgagatatccgcaccaacgcgcagcccggactcggtaatggcgcgcattgcgcccagcgccatctgatcgttggcaaccagcatcgcagtgggaacgatgccctcattcagcatttgcatggtttgttgaaaaccggacatggcactccagtcgccttcccgttccgctatcggctgaatttgattgcgagtgagatatttatgccagccagccagacgcagacgcgccgagacagaacttaatgggcccgctaacagcgcgatttgctggtgacccaatgcgaccagatgctccacgcccagtcgcgtaccgtcttcatgggagaaaataatactgttgatgggtgtctggtcagagacatcaagaaataacgccggaacattagtgcaggcagcttccacagcaatggcatcctggtcatccagcggatagttaatgatcagcccactgacgcgttgcgcgagaagattgtgcaccgccgctttacaggcttcgacgccgcttcgttctaccatcgacaccaccacgctggcacccagttgatcggcgcgagatttaatcgccgcgacaatttgcgacggcgcgtgcagggccagactggaggtggcaacgccaatcagcaacgactgtttgcccgccagttgttgtgccacgcggttgggaatgtaattcagctccgccatcgccgcttccactttttcccgcgttttcgcagaaacgtggctggcctggttcaccacgcgggaaacggtctgataagagacaccggcatactctgcgacatcgtataacgttactggtttcacattcaccaccctgaattgactctcttccgggcgctatcatgccataccgcgaaaggttttgcgccattcgatggtgtccgggatctcgacgctctcccttatgcgactcctgcattaggaagcagcccagtagtaggttgaggccgttgagcaccgccgccgcaaggaatggtttaattaattctaga

SEQ ID NO: 487 - DNA, 11211 bp, Artificial Sequence
  Description of Artificial Sequence: Synthetic polynucleotide
  Category: Plasmid
  Description: pET21-CAT (H193Y)-sgRNA-MG68-4 (D109N)-nSpCas9 (D10A)
gaaataattttgtttaactttaagaaggagatataccatgggcagcagtcatcatcatcaccatcacatgactgattctcaaaatgatacagatgaatactggatgggagaggccctgaagttggcacaaaaggcatgggacgaaggagaggtgcccgtaggagccatcttggttcgtaagggcgaagttatcggtcatggctggaaccgtagcatcgggtcccatgacccctcggcgcatgctgaaattatggctattcgtgaagccggggtgcgtatcggtaattatcgcatgttggataccgtattatacgttacgctggagccgtgtgcaatgtgcgcaggggcacttgttcacgggcgtatttcacgcttggtctttggtgccgaaaaccccaagacaggggcgtgcgggtcagtcatggacattgctcgccaccctgctttgaaccaccaattacaagttgatggtggggtaatggcggctccttgtgcgcgtcttttatctgacttctttcgctggcgtcgcgctcagaaaaaggcggcccgtgataatagttcggggaactcaggcgggtcgtcgggaggaagcagtggcagcgagactcccggaacttcggagagcgctacaccagaaagtagtggaggcagctctggtgggtccatggataagaaatactcaataggactggcgattggcacaaatagcgtcggatgggctgtgatcactgatgaatataaggttccttctaaaaagttcaaggttctgggaaatacagaccgccacagtatcaaaaaaaatcttataggggctcttctgtttgacagtggagagacagccgaagctactagactcaaacggacagctaggagaaggtatacaagacggaagaataggatttgttatctccaggagattttttcaaatgagatggccaaagtggatgatagtttctttcatagacttgaagagtcttttttggtggaagaagacaagaagcatgaaagacatcctatttttggaaatatagtggatgaagttgcttatcacgagaaatatccaactatctatcatctgagaaaaaaattggtggattctactgataaagccgatttgcgcctgatctatttggccctggcccacatgattaagtttagaggtcattttttgattgagggcgatctgaatcctgataatagtgatgtggacaaactgtttatccagttggtgcaaacctacaatcaactgtttgaagaaaaccctattaacgcaagtggagtggatgctaaagccattctttctgcaagattgagtaaatcaagaagactggaaaatctcattgctcagctccccggtgagaagaaaaatggcctgtttgggaatctcattgctttgtcattgggtttgacccctaattttaaatcaaattttgatttggcagaagatgctaaactccagctttcaaaagatacttacgatgatgatctggataatctgttggctcaaattggagatcaatatgctgatttgtttttggcagctaagaatctgtcagatgctattctgctttcagacatcctgagagtgaatactgaaataactaaggctcccctgtcagcttcaatgattaaacgctacgatgaacatcatcaagacttgactcttctgaaagccctggttagacaacaacttccagaaaagtataaagaaatcttttttgatcaatcaaaaaacggatatgcaggttatattgatggcggcgcaagccaagaagaattttataaatttatcaaaccaattctggaaaaaatggatggtactgaggaactgttggtgaaactgaatagagaagatttgctgcgcaagcaacggacctttgacaacggctctattccccatcaaattcacttgggtgagctgcatgctattttgagaagacaagaagacttttatccatttctgaaagacaatagagagaagattgaaaaaatcttgacttttaggattccttattatgttggtccattggccagaggcaatagtaggtttgcatggatgactcggaagtctgaagaaacaattaccccatggaattttgaagaagttgtcgataaaggtgcttcagctcaatcatttattgaacgcatgacaaactttgataaaaatcttccaaatgaaaaagtgctgccaaaacatagtttgctttatgagtattttaccgtttataacgaattgacaaaggtcaaatatgttactgaaggaatgagaaaaccagcatttctttcaggtgaacagaagaaagccattgttgatctgctcttcaaaacaaataggaaagtgaccgttaagcaactgaaagaagattatttcaaaaaaatagaatgttttgatagtgttgaaatttcaggagttgaagatagatttaatgcttcactgggtacataccatgatttgctgaaaattattaaagataaagattttttggataatgaagaaaatgaagacatcctggaggatattgttctgacattgaccctgtttgaagatagggagatgattgaggaaagacttaaaacatacgctcacctctttgatgataaggtgatgaaacagcttaaaagacgcagatatactggttggggaaggttgtccagaaaattgattaatggtattagggataagcaatctggcaaaacaatactggattttttgaaatcagatggttttgccaatcgcaattttatgcagctcatccatgatgatagtttgacatttaaagaagacatccaaaaagcacaagtgtctggacaaggcgatagtctgcatgaacatattgcaaatctggctggtagccctgctattaaaaaaggtattctccagactgtgaaagttgttgatgaattggtcaaagtgatggggcggcataagccagaaaatatcgttattgaaatggcaagagaaaatcagacaactcaaaagggccagaaaaattccagagagaggatgaaaagaatcgaagaaggtatcaaagaactgggaagtcagattcttaaagagcatcctgttgaaaatactcaattgcaaaatgaaaagctctatctctattatctccaaaatggaagagatatgtatgtggaccaagaactggatattaataggctgagtgattatgatgtcgatcacattgttccacaaagtttccttaaagacgattcaatagacaataaggtcctgaccaggtctgataaaaatagaggtaaatccgataacgttccaagtgaagaagtggtcaaaaagatgaaaaactattggagacaacttctgaacgccaagctgatcactcaaaggaagtttgataatctgaccaaagctgaaagaggaggtttgagtgaacttgataaagctggttttatcaaacgccaattggttgaaactcgccaaatcactaagcatgtggcacaaattttggatagtcgcatgaatactaaatacgatgaaaatgataaacttattagagaggttaaagtgattaccctgaaatctaaactggtttctgacttcagaaaagatttccaattctataaagtgagagagattaacaattaccatcatgcccatgatgcctatctgaatgccgtcgttggaactgctttgattaagaaatatccaaaacttgaaagcgagtttgtctatggtgattataaagtttatgatgttaggaaaatgattgctaagtctgagcaagaaataggcaaagcaaccgcaaagtatttcttttactctaatatcatgaacttcttcaaaacagaaattacacttgcaaatggagagattcgcaaacgccctctgatcgaaactaatggggaaactggagaaattgtctgggataaagggagagattttgccacagtgcgcaaagtgttgtccatgccccaagtcaatatcgtcaagaaaacagaagtgcagacaggcggattctctaaggagtcaattctgccaaaaagaaattccgacaagctgattgctaggaaaaaagactgggacccaaaaaaatatggtggttttgatagtccaaccgtggcttattcagtcctggtggttgctaaggtggaaaaagggaaatccaagaagctgaaatccgttaaagagctgctggggatcacaattatggaaagaagttcctttgaaaaaaatcccattgactttctggaagctaaaggatataaggaagttaaaaaagacctgatcattaaactgcctaaatatagtctttttgagctggaaaacggtaggaaacggatgctggctagtgccggagaactgcaaaaaggaaatgagctggctctgccaagcaaatatgtgaattttctgtatctggctagtcattatgaaaagttgaagggtagtccagaagataacgaacaaaaacaattgtttgtggagcagcataagcattatctggatgagattattgagcaaatcagtgaattttctaagagagttattctggcagatgccaatctggataaagttcttagtgcatataacaaacatagagacaaaccaataagagaacaagcagaaaatatcattcatctgtttaccttgaccaatcttggagcacccgctgcttttaaatactttgatacaacaattgataggaaaagatatacctctacaaaagaagttctggatgccactcttatccatcaatccatcactggtctttatgaaacacgcattgatttgagtcagctgggaggtgacggctctggcgggtctcccaagaagaagaggaaagtctaagatccggctgctaacaaagcccgaaaggaagctgagttggctgctgccaccgctgagcaataactagcataaccccttggggcctctaaacgggtcttgaggggttttttgctgaaaggaggaactatatccggattggcgaatgggacgcgccctgtagcggcgcattaagcgcggcgggtgtggtggttacgcgcagcgtgaccgctacacttgccagcgccctagcgcccgctcctttcgctttcttcccttcctttctcgccacgttcgccggctttccccgtcaagctctaaatcgggggctccctttagggttccgatttagtgctttacggcacctcgaccccaaaaaacttgattagggtgatggttcacgtagtgggccatcgccctgatagacggtttttcgccctttgacgttggagtccacgttctttaatagtggactcttgttccaaactggaacaacactcaaccctatctcggtctattcttttgatttataagggattttgccgatttcggcctattggttaaaaaatgagctgatttaacaaaaatttaacgcgaattttaacaaaatattaacgcttacaatttaggtggcacttttcggggaaatgtgcgcggaacccctatttgtttatttttctaaatacattcaaatatgtatccgctcatgagacaataaccctgataaatgcttcaataatattgaaaaaggaagagtatgagtattcaacatttccgtgtcgcccttattcccttttttgcggcattttgccttcctgtttttgctcacccagaaacgctggtgaaagtaaaagatgctgaagatcagttgggtgcacgagtgggttacatcgaactggatctcaacagcggtaagatccttgagagttttcgccccgaagaacgttttccaatgatgagcacttttaaagttctgctatgtggcgcggtattatcccgtattgacgccgggcaagagcaactcggtcgccgcatacactattctcagaatgacttggttgagtactcaccagtcacagaaaagcatcttacggatggcatgacagtaagagaattatgcagtgctgccataaccatgagtgataacactgcggccaacttacttctgacaacgatcggaggaccgaaggagctaaccgcttttttgcacaacatgggggatcatgtaactcgccttgatcgttgggaaccggagctgaatgaagccataccaaacgacgagcgtgacaccacgatgcctgcagcaatggcaacaacgttgcgcaaactattaactggcgaactacttactctagcttcccggcaacaattaatagactggatggaggcggataaagttgcaggaccacttctgcgctcggcccttccggctggctggtttattgctgataaatctggagccggtgagcgtgggtctcgcggtatcattgcagcactggggccagatggtaagccctcccgtatcgtagttatctacacgacggggagtcaggcaactatggatgaacgaaatagacagatcgctgagataggtgcctcactgattaagcattggtaactgtcagaccaagtttactcatatatactttagattgatttaaaacttcatttttaatttaaaaggatctaggtgaagatcctttttgataatctcatgaccaaaatcccttaacgtgagttttcgttccactgagcgtcagaccccgtagaaaagatcaaaggatcttcttgagatcctttttttctgcgcgtaatctgctgcttgcaaacaaaaaaaccaccgctaccagcggtggtttgtttgccggatcaagagctaccaactctttttccgaaggtaactggcttcagcagagcgcagataccaaatactgtccttctagtgtagccgtagttaggccaccacttcaagaactctgtagcaccgcctacatacctcgctctgctaatcctgttaccagtggctgctgccagtggcgataagtcgtgtcttaccgggttggactcaagacgatagttaccggataaggcgcagcggtcgggctgaacggggggttcgtgcacacagcccagcttggagcgaacgacctacaccgaactgagatacctacagcgtgagctatgagaaagcgccacgcttcccgaagggagaaaggcggacaggtatccggtaagcggcagggtcggaacaggagagcgcacgagggagcttccagggggaaacgcctggtatctttatagtcctgtcgggtttcgccacctctgacttgagcgtcgatttttgtgatgctcgtcaggggggcggagcctatggaaaaacgccagcaacgcggcctttttacggttcctggccttttgctggccttttgctcacatgttctttcctgcgttatcccctgattctgtggataaccgtattaccgcctttgagtgagctgataccgctcgccgcagccgaacgaccgagcgcagcgagtcagtgagcgaggaagcggaagagcgcctgatgcggtattttctccttacgcatctgtgcggtatttcacaccgcaatggtgcactctcagtacaatctgctctgatgccgcatagttaagccagtatacactccgctatcgctacgtgactgggtcatggctgcgccccgacacccgccaacacccgctgacgcgccctgacgggcttgtctgctcccggcatccgcttacagacaagctgtgaccgtctccgggagctgcatgtgtcagaggttttcaccgtcatcaccgaaacgcgcgaggcagctgcggtaaagctcatcagcgtggtcgtgaagcgattcacagatgtctgcctgttcatccgcgtccagctcgttgagtttctccagaagcgttaatgtctggcttctgataaagcgggccatgttaagggcggttttttcctgtttggtcactgatgcctccgtgtaagggggatttctgttcatgggggtaatgataccgatgaaacgagagaggatgctcacgatacgggttactgatgatgaacatgcccggttactggaacgttgtgagggtaaacaactggcggtatggatgcggcgggaccagagaaaaatcactcagggtcaatgccagcgcttcgttaatacagatgtaggtgttccacagggtagccagcagcatcctgcgatgcagatccggaacataatggtgcagggcgctgacttccgcgtttccagactttacgaaacacggaaaccgaagaccattcatgttgttgctcaggtcgcagacgttttgcagcagcagtcgcttcacgttcgctcgcgtatcggtgattcattctgctaaccagtaaggcaaccccgccagcctagccgggtcctcaacgacaggagcacgatcatgcgcacccgtggggccgccatgccggcgataatggcctgcttctcgccgaaacgtttggtggcgggaccagtgacgaaggcttgagcgagggcgtgcaagattccgaataccgcaagcgacaggccgatcatcgtcgcgctccagcgaaagcggtcctcgccgaaaatgacccagagcgctgccggcacctgtcctacgagttgcatgataaagaagacagtcataagtgcggcgacgatagtcatgccccgcgcccaccggaaggagctgactgggttgaaggctctcaagggcatcggtcgagatcccggtgcctaatgagtgagctaacttacattaattgcgttgcgctcactgcccgctttccagtcgggaaacctgtcgtgccagctgcattaatgaatcggccaacgcgcggggagaggcggtttgcgtattgggcgccagggtggtttttcttttcaccagtgagacgggcaacagctgattgcccttcaccgcctggccctgagagagttgcagcaagcggtccacgctggtttgccccagcaggcgaaaatcctgtttgatggtggttaacggcgggatataacatgagctgtcttcggtatcgtcgtatcccactaccgagatatccgcaccaacgcgcagcccggactcggtaatggcgcgcattgcgcccagcgccatctgatcgttggcaaccagcatcgcagtgggaacgatgccctcattcagcatttgcatggtttgttgaaaaccggacatggcactccagtcgccttcccgttccgctatcggctgaatttgattgcgagtgagatatttatgccagccagccagacgcagacgcgccgagacagaacttaatgggcccgctaacagcgcgatttgctggtgacccaatgcgaccagatgctccacgcccagtcgcgtaccgtcttcatgggagaaaataatactgttgatgggtgtctggtcagagacatcaagaaataacgccggaacattagtgcaggcagcttccacagcaatggcatcctggtcatccagcggatagttaatgatcagcccactgacgcgttgcgcgagaagattgtgcaccgccgctttacaggcttcgacgccgcttcgttctaccatcgacaccaccacgctggcacccagttgatcggcgcgagatttaatcgccgcgacaatttgcgacggcgcgtgcagggccagactggaggtggcaacgccaatcagcaacgactgtttgcccgccagttgttgtgccacgcggttgggaatgtaattcagctccgccatcgccgcttccactttttcccgcgttttcgcagaaacgtggctggcctggttcaccacgcgggaaacggtctgataagagacaccggcatactctgcgacatcgtataacgttactggtttcacattcaccaccctgaattgactctcttccgggcgctatcatgccataccgcgaaaggttttgcgccattcgatggtgtccgggatctcgacgctctcccttatgcgactcctgcattaggaagcagcccagtagtaggttgaggccgttgagcaccgccgccgcaaggaatggtttaattaatttgatcggcacgtaagaggttccaactttcaccataatgaaataagatcactaccgggcgtattttttgagttatcgagattttcaggagctaaggaagctaaaatggagaaaaaaatcactggatataccaccgttgatatatcccaatggcatcgtaaagaacattttgaggcatttcagtcagttgctcaatgtacctataaccagaccgttcagctggatattacggcctttttaaagaccgtaaagaaaaataagcacaagttttatccggcctttattcacattcttgcccgcctgatgaatgctcatccggaattccgtatggcaatgaaagacggtgagctggtgatatgggatagtgttcacccttgttacaccgttttccatgagcaaactgaaacgttttcatcgctctggagtgaataccacgacgatttccggcagtttctacacatatattcgcaagatgtggcgtgttacggtgaaaacctggcctatttccctaaagggtttattgagaatatgttttttgtctcagccaatccctgggtgagtttcaccagttttgatttaaacgtggccaatatggacaacttcttcgcccccgttttcaccatgggcaaatattatacgcaaggcgacaaggtgctgatgccgctggcgattcaggttcattatgccgtctgtgatggcttccatgtcggcagaatgcttaatgaattacaacagtactgcgatgagtggcagggcggggcgtaatttttttaaggcagttattggtgcccttaaacgcctggtgctacgcctgaataagtgaagcatgcaaggagatggcgcccaacagtcccccggccacggggcctgccaccatacccacgccgaaacaagcgctcatgagcccgaagtggcgagcccgatcttccccatcggtgatgtcggcgatataggcgccagcaaccgcacctgtggcgccggtgatgccggccacgatgcgtccggcgtagaggatcgactcgagtgcggccgcaagcttgtcgacggagctcgaattcggatcctaatacgactcactatagtaatgaacctgaatcgccaggttttagagctagaaatagcaagttaaaataaggctagtccgttatcaacttgaaaaagtggcaccgagtcggtgcttttttgtgaacctgcaggaggcatcaaataaaacgaaaggctcagtcgaaagactgggcctttcgttttatctgttgtttgtcggtgaacgctctcctgagtaggacaaattcgatcccgcgaaattaatacgactcactataggggaattgtgagcggataacaattcccctctaggatcc

SEQ ID NO: 488 - DNA, 96 bp, Artificial Sequence
  Description of Artificial Sequence: Synthetic oligonucleotide
  Category: sgRNA scaffold sequence
  Description: MG15-1
gttgtaattccctagaaataggttattacaataaggtccaacaggagtgttggtaccgtaaagctctaacggcacccacgggtgccgttatctttt

SEQ ID NO: 489 - DNA, 123 bp, Artificial Sequence
  Description of Artificial Sequence: Synthetic polynucleotide
  Category: sgRNA scaffold sequence
  Description: MG34-1
gttacagttaagaaattaattgtaaaacgcctatacagtgaagggatatacgcttgggtttgtccagcctgagcctctatgccagaaatggcgccttcatcgtgggttaggacatttaatttt

SEQ ID NO: 490 - DNA, 22 bp, Artificial Sequence
  Description of Artificial Sequence: Synthetic oligonucleotide
  Category: spacer
  Description: rAPOBEC1-nMG15-1 (D8A) in E. coli
gatccgcgctggctaccggcga

SEQ ID NO: 491 - DNA, 22 bp, Artificial Sequence
  Description of Artificial Sequence: Synthetic oligonucleotide
  Category: spacer
  Description: rAPOBEC1-nMG15-1 (D8A)-UGI (PBS1) in E. coli
gatccgcgctggctaccggcga

SEQ ID NO: 492 - DNA, 22 bp, Artificial Sequence
  Description of Artificial Sequence: Synthetic oligonucleotide
  Category: spacer
  Description: rAPOBEC1-nMG15-1 (D8A)-MG69-1 in E. coli
gatccgcgctggctaccggcga

SEQ ID NO: 493 - DNA, 22 bp, Artificial Sequence
  Description of Artificial Sequence: Synthetic oligonucleotide
  Category: spacer
  Description: rAPOBEC1-nMG15-1 (D8A)-MG69-2 in E. coli
gatccgcgctggctaccggcga

SEQ ID NO: 494 - DNA, 22 bp, Artificial Sequence
  Description of Artificial Sequence: Synthetic oligonucleotide
  Category: spacer
  Description: rAPOBEC1-nMG15-1 (D8A)-MG69-3 in E. coli
gatccgcgctggctaccggcga

SEQ ID NO: 495 - DNA, 20 bp, Artificial Sequence
  Description of Artificial Sequence: Synthetic oligonucleotide
  Category: spacer
  Description: rAPOBEC1-nSpCas9 (D10A)-UGI (PBS1) in HEK293T
ggcccagactgagcacgtga

SEQ ID NO: 496 - DNA, 20 bp, Artificial Sequence
  Description of Artificial Sequence: Synthetic oligonucleotide
  Category: spacer
  Description: rAPOBEC1-nSpCas9 (D10A) in HEK293T
ggcccagactgagcacgtga

SEQ ID NO: 497 - DNA, 20 bp, Artificial Sequence
  Description of Artificial Sequence: Synthetic oligonucleotide
  Category: spacer
  Description: rAPOBEC1-nSpCas9 (D10A)-MG69-1 in HEK293T
ggcccagactgagcacgtga

SEQ ID NO: 498 - DNA, 20 bp, Artificial Sequence
  Description of Artificial Sequence: Synthetic oligonucleotide
  Category: spacer
  Description: rAPOBEC1-nSpCas9 (D10A)-MG69-2 in HEK293T
ggcccagactgagcacgtga

SEQ ID NO: 499 - DNA, 22 bp, Artificial Sequence
  Description of Artificial Sequence: Synthetic oligonucleotide
  Category: spacer
  Description: A0A2K5RDN7-nMG1-4 (D9A)-MG69-1_site 1 in HEK293T
gattcccacctctcaatacgtt

SEQ ID NO: 500 - DNA, 22 bp, Artificial Sequence
  Description of Artificial Sequence: Synthetic oligonucleotide
  Category: spacer
  Description: A0A2K5RDN7-nMG1-4 (D9A)-MG69-1_site 2 in HEK293T
cccaggcaggcaggctctccga

SEQ ID NO: 501 - DNA, 22 bp, Artificial Sequence
  Description of Artificial Sequence: Synthetic oligonucleotide
  Category: spacer
  Description: A0A2K5RDN7-nMG1-4 (D9A)-MG69-1_site 3 in HEK293T
caccccctctccctccatcagt

SEQ ID NO: 502 - DNA, 22 bp, Artificial Sequence
  Description of Artificial Sequence: Synthetic oligonucleotide
  Category: spacer
  Description: A0A2K5RDN7-nMG1-4 (D9A)-MG69-1_site 4 in HEK293T
tgtacacagtttcccaagctac

SEQ ID NO: 503 - DNA, 22 bp, Artificial Sequence
  Description of Artificial Sequence: Synthetic oligonucleotide
  Category: spacer
  Description: A0A2K5RDN7-nMG3-6 (D13A)-MG69-1_site 1 in HEK293T
ctggactctggccactccctgg

SEQ ID NO: 504 - DNA, 22 bp, Artificial Sequence
  Description of Artificial Sequence: Synthetic oligonucleotide
  Category: spacer
  Description: A0A2K5RDN7-nMG3-6 (D13A)-MG69-1_site 2 in HEK293T
catccagctccagccccagagc

SEQ ID NO: 505 - DNA, 22 bp, Artificial Sequence
  Description of Artificial Sequence: Synthetic oligonucleotide
  Category: spacer
  Description: A0A2K5RDN7-nMG3-6 (D13A)-MG69-1_site 3 in HEK293T
gattccggctctgagggccagt

SEQ ID NO: 506 - DNA, 22 bp, Artificial Sequence
  Description of Artificial Sequence: Synthetic oligonucleotide
  Category: spacer
  Description: A0A2K5RDN7-nMG3-6 (D13A)-MG69-1_site 4 in HEK293T
gcccttctgtttgtcccacttg

SEQ ID NO: 507 - DNA, 22 bp, Artificial Sequence
  Description of Artificial Sequence: Synthetic oligonucleotide
  Category: spacer
  Description: A0A2K5RDN7-nMG3-6 (D13A)-MG69-1_site 5 in HEK293T
ttggccaagccaggcctagaat

SEQ ID NO: 508 - DNA, 22 bp, Artificial Sequence
  Description of Artificial Sequence: Synthetic oligonucleotide
  Category: spacer
  Description: A0A2K5RDN7-nMG3-6 (D13A)-MG69-1_site 6 in HEK293T
ctcagctggtacacggcagggt

SEQ ID NO: 509 - DNA, 22 bp, Artificial Sequence
  Description of Artificial Sequence: Synthetic oligonucleotide
  Category: spacer
  Description: A0A2K5RDN7-nMG3-6 (D13A)-MG69-1_site 7 in HEK293T
tcgcctatgggaactctggagg

SEQ ID NO: 510 - DNA, 22 bp, Artificial Sequence
  Description of Artificial Sequence: Synthetic oligonucleotide
  Category: spacer
  Description: A0A2K5RDN7-nMG4-2 (D28A)-MG69-1_site 1 in HEK293T
cctaacatggataagtccagat

SEQ ID NO: 511 - DNA, 22 bp, Artificial Sequence
  Description of Artificial Sequence: Synthetic oligonucleotide
  Category: spacer
  Description: A0A2K5RDN7-nMG4-2 (D28A)-MG69-1_site 2 in HEK293T
ggccctcagagccggaatctac

SEQ ID NO: 512 - DNA, 22 bp, Artificial Sequence
  Description of Artificial Sequence: Synthetic oligonucleotide
  Category: spacer
  Description: A0A2K5RDN7-nMG4-2 (D28A)-MG69-1_site 3 in HEK293T
tgtcctccctcaagatacagga

SEQ ID NO: 513 - DNA, 22 bp, Artificial Sequence
  Description of Artificial Sequence: Synthetic oligonucleotide
  Category: spacer
  Description: A0A2K5RDN7-nMG4-2 (D28A)-MG69-1_site 4 in HEK293T
tgtgttcacctgcccttctgtt

SEQ ID NO: 514 - DNA, 22 bp, Artificial Sequence
  Description of Artificial Sequence: Synthetic oligonucleotide
  Category: spacer
  Description: A0A2K5RDN7-nMG18-1 (D12A)-MG69-1_site 1 in HEK293T
cagtgtcccccttccctatggg

SEQ ID NO: 515 - DNA, 22 bp, Artificial Sequence
  Description of Artificial Sequence: Synthetic oligonucleotide
  Category: spacer
  Description: A0A2K5RDN7-nMG18-1 (D12A)-MG69-1_site 2 in HEK293T
cccccttccctatgggaataat

SEQ ID NO: 516 - DNA, 22 bp, Artificial Sequence
  Description of Artificial Sequence: Synthetic oligonucleotide
  Category: spacer
  Description: A0A2K5RDN7-nMG18-1 (D12A)-MG69-1_site 3 in HEK293T
cagctccagccccagagcctgg

SEQ ID NO: 517 - DNA, 22 bp, Artificial Sequence
  Description of Artificial Sequence: Synthetic oligonucleotide
  Category: spacer
  Description: A0A2K5RDN7-nMG18-1 (D12A)-MG69-1_site 4 in HEK293T
gtgcctctccctgcagacggta

SEQ ID NO: 518 - DNA, 20 bp, Artificial Sequence
  Description of Artificial Sequence: Synthetic oligonucleotide
  Category: spacer
  Description: A0A2K5RDN7-nSpCas9 (D10A)-MG69-1_site 1 in HEK293T
ttgccacgaagcaggccaat

SEQ ID NO: 519 - DNA, 20 bp, Artificial Sequence
  Description of Artificial Sequence: Synthetic oligonucleotide
  Category: spacer
  Description: A0A2K5RDN7-nSpCas9 (D10A)-MG69-1_site 2 in HEK293T
cccggggccgccattgacag

SEQ ID NO: 520 - DNA, 20 bp, Artificial Sequence
  Description of Artificial Sequence: Synthetic oligonucleotide
  Category: spacer
  Description: A0A2K5RDN7-nSpCas9 (D10A)-MG69-1_site 3 in HEK293T
tccggctctgagggccagtg

SEQ ID NO: 521 - DNA, 20 bp, Artificial Sequence
  Description of Artificial Sequence: Synthetic oligonucleotide
  Category: spacer
  Description: A0A2K5RDN7-nSpCas9 (D10A)-MG69-1_site 4 in HEK293T
caaccagtccccagtgactc

SEQ ID NO: 522 - DNA, 20 bp, Artificial Sequence
  Description of Artificial Sequence: Synthetic oligonucleotide
  Category: spacer
  Description: A0A2K5RDN7-nSpCas9 (D10A)-MG69-1_site 5 in HEK293T
gagtccgagcagaagaagaa

SEQ ID NO: 523 - DNA, 21 bp, Artificial Sequence
  Description of Artificial Sequence: Synthetic primer
  Category: primer
  Description: Forward primer used to amplify lacZ of E. coli and Sanger sequencing
ccaggctttacactttatgct

SEQ ID NO: 524 - DNA, 25 bp, Artificial Sequence
  Description of Artificial Sequence: Synthetic primer
  Category: primer
  Description: Reverse primer used to amplify lacZ of E. coli and Sanger sequencing
cgaacatccaaaagtttgtgttttt

SEQ ID NO: 525 - DNA, 18 bp, Artificial Sequence
  Description of Artificial Sequence: Synthetic primer
  Category: primer
  Description: Sanger sequencing of base edit of lacZ of E. coli
ccgaaaggcgcggtgccg

SEQ ID NO: 526 - DNA, 19 bp, Artificial Sequence
  Description of Artificial Sequence: Synthetic primer
  Category: primer
  Description: Sanger sequencing of base edit of lacZ of E. coli
gtatgtggtggatgaagcc

SEQ ID NO: 527 - DNA, 18 bp, Artificial Sequence
  Description of Artificial Sequence: Synthetic primer
  Category: primer
  Description: Sanger sequencing of base edit of lacZ of E. coli
ttgtggagcgacatccag

SEQ ID NO: 528 - DNA, 19 bp, Artificial Sequence
  Description of Artificial Sequence: Synthetic primer
  Category: primer
  Description: Sanger sequencing of base edit of lacZ of E. coli
tgagcgcatttttacgcgc

SEQ ID NO: 529 - DNA, 18 bp, Artificial Sequence
  Description of Artificial Sequence: Synthetic primer
  Category: primer
  Description: Sanger sequencing of base edit of lacZ of E. coli
gaaaacggcaacccgtgg

SEQ ID NO: 530 - DNA, 20 bp, Artificial Sequence
  Description of Artificial Sequence: Synthetic primer
  Category: primer
  Description: Sanger sequencing of base edit of lacZ of E. coli
ggattgaaaatggtctgctg

SEQ ID NO: 531 - DNA, 18 bp, Artificial Sequence
  Description of Artificial Sequence: Synthetic primer
  Category: primer
  Description: Sanger sequencing of base edit of lacZ of E. coli
actgctgacgccgctgcg

SEQ ID NO: 532 - DNA, 48 bp, Artificial Sequence
  Description of Artificial Sequence: Synthetic primer
  Category: primer
  Description: Forward primer used to amplify CAT (H193Y) of CAT (H193Y)-sgRNA- MG68-4 variant-nSpCas9 (D10A)
ccgccgccgcaaggaatggtttaattaatttgatcggcacgtaagagg

SEQ ID NO: 533 - DNA, 50 bp, Artificial Sequence
  Description of Artificial Sequence: Synthetic primer
  Category: primer
  Description: Reverse primer used to amplify CAT (H193Y) of CAT (H193Y)-sgRNA-MG68-4 variant-nSpCas9
ggactgttgggcgccatctccttgcatgcttcacttattcaggcgtagca

SEQ ID NO: 534 - DNA, 50 bp, Artificial Sequence
  Description of Artificial Sequence: Synthetic primer
  Category: primer
  Description: Forward primer used to amplify CAT (H193Y) of CAT (H193Y)-sgRNA-MG68-4 variant-nMG34-1 (D10A)
aaggaatggtttaattaattctagattaattaatttgatcggcacgtaag

SEQ ID NO: 535 - DNA, 50 bp, Artificial Sequence; identical to SEQ ID NO: 533
  Description of Artificial Sequence: Synthetic primer
  Category: primer
  Description: Sanger sequencing primer of CAT (H193Y)

SEQ ID NO: 536 - DNA, 18 bp, Artificial Sequence
  Description of Artificial Sequence: Synthetic primer
  Category: primer
  Description: Forward primer used to amplify BE3 target site in HEK293T cells and Sanger sequencing
gaggctggagaggcccgt

SEQ ID NO: 537 - DNA, 22 bp, Artificial Sequence
  Description of Artificial Sequence: Synthetic primer
  Category: primer
  Description: Reverse primer used to amplify BE3 target site in HEK293T cells for Sanger sequencing
gattttcatgcaggtgctgaaa

SEQ ID NO: 538 - DNA, 36 bp, Artificial Sequence
  Description of Artificial Sequence: Synthetic primer
  Category: primer
  Description: Forward primer used to amplify A0A2K5RDN7-nSpCas9 (D10A)-MG69-1_site 1 in HEK293T cells
  modified_base (14)..(18): a, c, t, g, unknown or other
gctcttccgatctnnnnnaggaggaagggcctgagt

SEQ ID NO: 539 - DNA, 36 bp, Artificial Sequence
  Description of Artificial Sequence: Synthetic primer
  Category: primer
  Description: Reverse primer used to amplify A0A2K5RDN7-nSpCas9 (D10A)-MG69-1_site 1 in HEK293T cells
  modified_base (14)..(18): a, c, t, g, unknown or other
gctcttccgatctnnnnntctgccctcgtgggtttg

SEQ ID NO: 540 - DNA, 36 bp, Artificial Sequence
  Description of Artificial Sequence: Synthetic primer
  Category: primer
  Description: Forward primer used to amplify A0A2K5RDN7-nSpCas9 (D10A)-MG69-1_site 2 in HEK293T cells
  modified_base (14)..(18): a, c, t, g, unknown or other
gctcttccgatctnnnnnctctggccactccctggc

SEQ ID NO: 541 - DNA, 36 bp, Artificial Sequence
  Description of Artificial Sequence: Synthetic primer
  Category: primer
  Description: Reverse primer used to amplify A0A2K5RDN7-nSpCas9 (D10A)-MG69-1_site 2 in HEK293T cells
  modified_base (14)..(18): a, c, t, g, unknown or other
gctcttccgatctnnnnnggcaggctctccgaggag

SEQ ID NO: 542 - DNA, 44 bp, Artificial Sequence
  Description of Artificial Sequence: Synthetic primer
  Category: primer
  Description: Forward primer used to amplify A0A2K5RDN7-nSpCas9 (D10A)-MG69-1_site 3 in HEK293T cells
  modified_base (14)..(18): a, c, t, g, unknown or other
gctcttccgatctnnnnngggaataataaaagtctctctcttaa

SEQ ID NO: 543 - DNA, 36 bp, Artificial Sequence
  Description of Artificial Sequence: Synthetic primer
  Category: primer
  Description: Reverse primer used to amplify A0A2K5RDN7-nSpCas9 (D10A)-MG69-1_site 3 in HEK293T cells
  modified_base (14)..(18): a, c, t, g, unknown or other
gctcttccgatctnnnnnccccctccaccagtaccc

SEQ ID NO: 544 - DNA, 36 bp, Artificial Sequence
  Description of Artificial Sequence: Synthetic primer
  Category: primer
  Description: Forward primer used to amplify A0A2K5RDN7-nSpCas9 (D10A)-MG69-1_site 4 in HEK293T cells
  modified_base (14)..(18): a, c, t, g, unknown or other
gctcttccgatctnnnnncctgtccttggagaaccg

SEQ ID NO: 545 - DNA, 37 bp, Artificial Sequence
  Description of Artificial Sequence: Synthetic primer
  Category: primer
  Description: Reverse primer used to amplify A0A2K5RDN7-nSpCas9 (D10A)-MG69-1_site 4 in HEK293T cells
  modified_base (14)..(18): a, c, t, g, unknown or other
gctcttccgatctnnnnngcaggtgaacacaagagct

SEQ ID NO: 546 - DNA, 37 bp, Artificial Sequence
  Description of Artificial Sequence: Synthetic primer
  Category: primer
  Description: Forward primer used to amplify A0A2K5RDN7-nSpCas9 (D10A)-MG69-1_site 5 in HEK293T cells
  modified_base (14)..(18): a, c, t, g, unknown or other
gctcttccgatctnnnnngaaggtgtggttccagaac

SEQ ID NO: 547 - DNA, 36 bp, Artificial Sequence
  Description of Artificial Sequence: Synthetic primer
  Category: primer
  Description: Reverse primer used to amplify A0A2K5RDN7-nSpCas9 (D10A)-MG69-1_site 5 in HEK293T cells
  modified_base (14)..(18): a, c, t, g, unknown or other
gctcttccgatctnnnnntcgatgtcctccccattg

SEQ ID NO: 548 - DNA, 38 bp, Artificial Sequence
  Description of Artificial Sequence: Synthetic primer
  Category: primer
  Description: Forward primer used to amplify A0A2K5RDN7-nMG1-4 (D9A)-MG69-1_site 1 in HEK293T cells
  modified_base (14)..(18): a, c, t, g, unknown or other
gctcttccgatctnnnnnaaacaggctagacataggga

SEQ ID NO: 549 - DNA, 37 bp, Artificial Sequence
  Description of Artificial Sequence: Synthetic primer
  Category: primer
  Description: Reverse primer used to amplify A0A2K5RDN7-nMG1-4 (D9A)-MG69-1_site 1 in HEK293T cells
  modified_base (14)..(18): a, c, t, g, unknown or other
gctcttccgatctnnnnngaagccaccagagtctcta

SEQ ID NO: 550 - DNA, 36 bp, Artificial Sequence
  Description of Artificial Sequence: Synthetic primer
  Category: primer
  Description: Forward primer used to amplify A0A2K5RDN7-nMG1-4 (D9A)-MG69-1_site 2 in HEK293T cells
  modified_base (14)..(18): a, c, t, g, unknown or other
gctcttccgatctnnnnngccgccattgacagaggg

SEQ ID NO: 551 - DNA, 41 bp, Artificial Sequence
  Description of Artificial Sequence: Synthetic primer
  Category: primer
  Description: Reverse primer used to amplify A0A2K5RDN7-nMG1-4 (D9A)-MG69-1_site 2 in HEK293T cells
  modified_base (14)..(18): a, c, t, g, unknown or other
gctcttccgatctnnnnngcatcaaaacaaaagggagattg

SEQ ID NO: 552 - DNA, 36 bp, Artificial Sequence
  Description of Artificial Sequence: Synthetic primer
  Category: primer
  Description: Forward primer used to amplify A0A2K5RDN7-nMG1-4 (D9A)-MG69-1_site 3 in HEK293T cells
  modified_base (14)..(18): a, c, t, g, unknown or other
gctcttccgatctnnnnncctctgcccacctcactt

SEQ ID NO: 553 - DNA, 37 bp, Artificial Sequence
  Description of Artificial Sequence: Synthetic primer
  Category: primer
  Description: Reverse primer used to amplify A0A2K5RDN7-nMG1-4 (D9A)-MG69-1_site 3 in HEK293T cells
  modified_base (14)..(18): a, c, t, g, unknown or other
gctcttccgatctnnnnngccatgtgggttaatctgg

SEQ ID NO: 554 - DNA, 36 bp, Artificial Sequence
  Description of Artificial Sequence: Synthetic primer
  Category: primer
  Description: Forward primer used to amplify A0A2K5RDN7-nMG1-4 (D9A)-MG69-1_site 4 in HEK293T cells
  modified_base (14)..(18): a, c, t, g, unknown or other
gctcttccgatctnnnnnccggacgcacctacccat

SEQ ID NO: 555 - DNA, 37 bp, Artificial Sequence
  Description of Artificial Sequence: Synthetic primer
  Category: primer
  Description: Reverse primer used to amplify A0A2K5RDN7-nMG1-4 (D9A)-MG69-1_site 4 in HEK293T cells
  modified_base (14)..(18): a, c, t, g, unknown or other
gctcttccgatctnnnnnctagatgggaatggatggg

SEQ ID NO: 556 - DNA, 36 bp, Artificial Sequence
  Description of Artificial Sequence: Synthetic primer
  Category: primer
  Description: Forward primer used to amplify A0A2K5RDN7-nMG3-6 (D13A)-MG69-1_site 1 in HEK293T cells
  modified_base (14)..(18): a, c, t, g, unknown or other
gctcttccgatctnnnnnaaccacaaacccacgagg

SEQ ID NO: 557 - DNA, 36 bp, Artificial Sequence
  Description of Artificial Sequence: Synthetic primer
  Category: primer
  Description: Reverse primer used to amplify A0A2K5RDN7-nMG3-6 (D13A)-MG69-1_site 1 in HEK293T cells
  modified_base (14)..(18): a, c, t, g, unknown or other
gctcttccgatctnnnnntcaatggcggccccgggc

SEQ ID NO: 558 - DNA, 36 bp, Artificial Sequence
  Description of Artificial Sequence: Synthetic primer
  Category: primer
  Description: Forward primer used to amplify A0A2K5RDN7-nMG3-6 (D13A)-MG69-1_site 2 in HEK293T cells
  modified_base (14)..(18): a, c, t, g, unknown or other
gctcttccgatctnnnnnagtgatccccagtgtccc

SEQ ID NO: 559 - DNA, 36 bp, Artificial Sequence
  Description of Artificial Sequence: Synthetic primer
  Category: primer
  Description: Reverse primer used to amplify A0A2K5RDN7-nMG3-6 (D13A)-MG69-1_site 2 in HEK293T cells
  modified_base (14)..(18): a, c, t, g, unknown or other
gctcttccgatctnnnnngccctgaacgcgtttgct

SEQ ID NO: 560 - DNA, 42 bp, Artificial Sequence
  Description of Artificial Sequence: Synthetic primer
  Category: primer
  Description: Forward primer used to amplify A0A2K5RDN7-nMG3-6 (D13A)-MG69-1_site 3 in HEK293T cells
  modified_base (14)..(18): a, c, t, g, unknown or other
gctcttccgatctnnnnntgggaataataaaagtctctctct

SEQ ID NO: 561 - DNA, 36 bp, Artificial Sequence
  Description of Artificial Sequence: Synthetic primer
  Category: primer
  Description: Reverse primer used to amplify A0A2K5RDN7-nMG3-6 (D13A)-MG69-1_site 3 in HEK293T cells
  modified_base (14)..(18): a, c, t, g, unknown or other
gctcttccgatctnnnnncccctccaccagtacccc

SEQ ID NO: 562 - DNA, 36 bp, Artificial Sequence
  Description of Artificial Sequence: Synthetic primer
  Category: primer
  Description: Forward primer used to amplify A0A2K5RDN7-nMG3-6 (D13A)-MG69-1_site 4 in HEK293T cells
  modified_base (14)..(18): a, c, t, g, unknown or other
gctcttccgatctnnnnncagggcctcctcagccca

SEQ ID NO: 563 - DNA, 38 bp, Artificial Sequence
  Description of Artificial Sequence: Synthetic primer
  Category: primer
  Description: Reverse primer used to amplify A0A2K5RDN7-nMG3-6 (D13A)-MG69-1_site 4 in HEK293T cells
  modified_base (14)..(18): a, c, t, g, unknown or other
gctcttccgatctnnnnngtctggatgtcgtaagggaa

SEQ ID NO: 564 - DNA, 40 bp, Artificial Sequence
  Description of Artificial Sequence: Synthetic primer
  Category: primer
  Description: Forward primer used to amplify A0A2K5RDN7-nMG3-6 (D13A)-MG69-1_site 5 in HEK293T cells
  modified_base (14)..(18): a, c, t, g, unknown or other
gctcttccgatctnnnnnggggtgtaactcagaatgtttt

SEQ ID NO: 565 - DNA, 36 bp, Artificial Sequence
  Description of Artificial Sequence: Synthetic primer
  Category: primer
  Description: Reverse primer used to amplify A0A2K5RDN7-nMG3-6 (D13A)-MG69-1_site 5 in HEK293T cells
  modified_base (14)..(18): a, c, t, g, unknown or other
gctcttccgatctnnnnngggagtgagactcagaga

SEQ ID NO: 566 - DNA, 39 bp, Artificial Sequence
  Description of Artificial Sequence: Synthetic primer
  Category: primer
  Description: Forward primer used to amplify A0A2K5RDN7-nMG3-6 (D13A)-MG69-1_site 6 in HEK293T cells
  modified_base (14)..(18): a, c, t, g, unknown or other
gctcttccgatctnnnnngcaaagagggaaatgagatca

SEQ ID NO: 567 - DNA, 41 bp, Artificial Sequence
  Description of Artificial Sequence: Synthetic primer
  Category: primer
  Description: Reverse primer used to amplify A0A2K5RDN7-nMG3-6 (D13A)-MG69-1_site 6 in HEK293T cells
  modified_base (14)..(18): a, c, t, g, unknown or other
gctcttccgatctnnnnngtgacacatttgtttgagaatca

SEQ ID NO: 568 - DNA, 36 bp, Artificial Sequence
  Description of Artificial Sequence: Synthetic primer
  Category: primer
  Description: Forward primer used to amplify A0A2K5RDN7-nMG3-6 (D13A)-MG69-1_site 7 in HEK293T cells
  modified_base (14)..(18): a, c, t, g, unknown or other
gctcttccgatctnnnnnctttatccccgcacagag

SEQ ID NO: 569 - DNA, 36 bp, Artificial Sequence
  Description of Artificial Sequence: Synthetic primer
  Category: primer
  Description: Reverse primer used to amplify A0A2K5RDN7-nMG3-6 (D13A)-MG69-1_site 7 in HEK293T cells
  modified_base (14)..(18): a, c, t, g, unknown or other
gctcttccgatctnnnnncttggcccatgggaaatc

SEQ ID NO: 570 - DNA, 36 bp, Artificial Sequence
  Description of Artificial Sequence: Synthetic primer
  Category: primer
  Description: Forward primer used to amplify A0A2K5RDN7-nMG4-2 (D28A)-MG69-1_site 1 in HEK293T cells
  modified_base (14)..(18): a, c, t, g, unknown or other
gctcttccgatctnnnnngtcccatcccaacacccc

SEQ ID NO: 571 - DNA, 36 bp, Artificial Sequence
  Description of Artificial Sequence: Synthetic primer
  Category: primer
  Description: Reverse primer used to amplify A0A2K5RDN7-nMG4-2 (D28A)-MG69-1_site 1 in HEK293T cells
  modified_base (14)..(18): a, c, t, g, unknown or other
gctcttccgatctnnnnntgggcatgtgtgctccca

SEQ ID NO: 572 - DNA, 42 bp, Artificial Sequence
  Description of Artificial Sequence: Synthetic primer
  Category: primer
  Description: Forward primer used to amplify A0A2K5RDN7-nMG4-2 (D28A)-MG69-1_site 2 in HEK293T cells
  modified_base (14)..(18): a, c, t, g, unknown or other
gctcttccgatctnnnnnctatgggaataataaaagtctctc

SEQ ID NO: 573 - DNA, 36 bp, Artificial Sequence
  Description of Artificial Sequence: Synthetic primer
  Category: primer
  Description: Reverse primer used to amplify A0A2K5RDN7-nMG4-2 (D28A)-MG69-1_site 2 in HEK293T cells
  modified_base (14)..(18): a, c, t, g, unknown or other
gctcttccgatctnnnnnctccaccagtaccccacc

SEQ ID NO: 574 - DNA, 36 bp, Artificial Sequence
  Description of Artificial Sequence: Synthetic primer
  Category: primer
  Description: Forward primer used to amplify A0A2K5RDN7-nMG4-2 (D28A)-MG69-1_site 3 in HEK293T cells
  modified_base (14)..(18): a, c, t, g, unknown or other
gctcttccgatctnnnnnggaccctggtctctacct

SEQ ID NO: 575 - DNA, 37 bp, Artificial Sequence
  Description of Artificial Sequence: Synthetic primer
  Category: primer
  Description: Reverse primer used to amplify A0A2K5RDN7-nMG4-2 (D28A)-MG69-1_site 3 in HEK293T cells
  modified_base (14)..(18): a, c, t, g, unknown or other
gctcttccgatctnnnnncctctcccattgaactacc

SEQ ID NO: 576 - DNA, 36 bp, Artificial Sequence
  Description of Artificial Sequence: Synthetic primer
  Category: primer
  Description: Forward primer used to amplify A0A2K5RDN7-nMG4-2 (D28A)-MG69-1_site 4 in HEK293T cells
  modified_base (14)..(18): a, c, t, g, unknown or other
gctcttccgatctnnnnnccccagtgactcagggcc

SEQ ID NO: 577 - DNA, 40 bp, Artificial Sequence
  Description of Artificial Sequence: Synthetic primer
  Category: primer
  Description: Reverse primer used to amplify A0A2K5RDN7-nMG4-2 (D28A)-MG69-1_site 4 in HEK293T cells
  modified_base (14)..(18): a, c, t, g, unknown or other
gctcttccgatctnnnnntcgtaagggaaagacttaggaa

SEQ ID NO: 578 - DNA, 42 bp, Artificial Sequence
  Description of Artificial Sequence: Synthetic primer
  Category: primer
  Description: Forward primer used to amplify A0A2K5RDN7-nMG18-1 (D12A)-MG69-1_site 1 in HEK293T cells
  modified_base (14)..(18): a, c, t, g, unknown or other
gctcttccgatctnnnnntctcccttttgttttgatgcattt

SEQ ID NO: 579 - DNA, 36 bp, Artificial Sequence
  Description of Artificial Sequence: Synthetic primer
  Category: primer
  Description: Reverse primer used to amplify A0A2K5RDN7-nMG18-1 (D12A)-MG69-1_site 1 in HEK293T cells
  modified_base (14)..(18): a, c, t, g, unknown or other
gctcttccgatctnnnnnccaccccaggctctgggg

SEQ ID NO: 580 - DNA, 44 bp, Artificial Sequence
  Description of Artificial Sequence: Synthetic primer
  Category: primer
  Description: Forward primer used to amplify A0A2K5RDN7-nMG18-1 (D12A)-MG69-1_site 2 in HEK293T cells
  modified_base (14)..(18): a, c, t, g, unknown or other
gctcttccgatctnnnnnccttttgttttgatgcatttctgttt

SEQ ID NO: 581 - DNA, 36 bp, Artificial Sequence
  Description of Artificial Sequence: Synthetic primer
  Category: primer
  Description: Reverse primer used to amplify A0A2K5RDN7-nMG18-1 (D12A)-MG69-1_site 2 in HEK293T cells
  modified_base (14)..(18): a, c, t, g, unknown or other
gctcttccgatctnnnnnaatctaccaccccaggct

SEQ ID NO: 582 - DNA, 36 bp, Artificial Sequence
  Description of Artificial Sequence: Synthetic primer
  Category: primer
  Description: Forward primer used to amplify A0A2K5RDN7-nMG18-1 (D12A)-MG69-1_site 3 in HEK293T cells
  modified_base (14)..(18): a, c, t, g, unknown or other
gctcttccgatctnnnnnatccccagtgtccccctt

SEQ ID NO: 583 - DNA, 36 bp, Artificial Sequence
  Description of Artificial Sequence: Synthetic primer
  Category: primer
  Description: Reverse primer used to amplify A0A2K5RDN7-nMG18-1 (D12A)-MG69-1_site 3 in HEK293T cells
  modified_base (14)..(18): a, c, t, g, unknown or other
gctcttccgatctnnnnnccaggccctgaacgcgtt

SEQ ID NO: 584 - DNA, 36 bp, Artificial Sequence
  Description of Artificial Sequence: Synthetic primer
  Category: primer
  Description: Forward primer used to amplify A0A2K5RDN7-nMG18-1 (D12A)-MG69-1_site 4 in HEK293T cells
  modified_base (14)..(18): a, c, t, g, unknown or other
gctcttccgatctnnnnnaggccaggcctgcggggg

SEQ ID NO: 585 - DNA, 41 bp, Artificial Sequence
  Description of Artificial Sequence: Synthetic primer
  Category: primer
  Description: Reverse primer used to amplify A0A2K5RDN7-nMG18-1 (D12A)-MG69-1_site 4 in HEK293T cells
  modified_base (14)..(18): a, c, t, g, unknown or other
gctcttccgatctnnnnnccaaaaactcccaaattagcaaa

SEQ ID NO: 586 - protein, 969 aa, Artificial Sequence
  Description of Artificial Sequence: Synthetic polypeptide
  Category: adenine base editor
  Description: TadA (ABE8.17m)-nMG34-1 (D10A)
MGSSHHHHHHSEVEFSHEYWMRHALTLAKRARDEREVPVGAVLVLNNRVIGEGWNRAIGLHDPTAHAEIMALRQGGLVMQNYRLIDATLYSTFEPCVMCAGAMIHSRIGRVVFGVRNAKTGAAGSLMDVLHYPGMNHRVEITEGILADECAALLCYFFRMPRRVFNAQKKAQSSTDSGGSSGGSSGSETPGTSESATPESSGGSSGGSMERELVLGIAYGGKYTGLAVVDRRHNQVLYANRLKMRDDVAGILKDRRKQRGIRRTAQTKKKRLRELKNYLKSIGYNESTATFETVYSLAHKRGYDYADMPEEKTSEEIEAMDVEERKQWEKEKQEWEETKRNSRHRKEVVKDVHKAMIEGRATEEQIKRVERIFNKQYRPKRFNNRILTKCKVEDCGVNTPLRKNVRDLLIENIVRFFPIEQSEKDNLKDAVLDKNRREEVKSFFRKHKTDEHIRKQVYDIADNKLSGRTVFCKEHILEHTEHSKEERKVFRLAPSLKTKIENVLAVIKDEILPKFTVNKVVMESNNFDIAAKTQGKKRLAKEEYGKGPREGKETRKEALLRETDGRCIYCGKSIDISNAHDDHIFPRKAGGLNIFANLVACCAVCNENKKGRTPLESGISPKPEIIAFMKNDLKKKILEDARNINTVDFNKYMSHASIGWRYMRDRLRESAGNKKLPIERQSGIYTAYFRRWWGFKKERGNTLHHALDAVILASRKGYSDDGLVDMTLKPKYNKGGEFDPEKHLPEPIEFKMDKGSRGSALHDRNPLSYKKGIITRRFMVTEIECGKEDDVISETYREKLKEAFKRFDTKKGKCLTDKEAKEAGFCIKKNELVMSLKCSIKGTGPGQMIRINNNVFKTNVHNVGVDVYLDEKGKKKAYERKNPRLSKHFIEPPPQPNGRVSFTLKRRDMVTVEGEDAIYRIKKLGTSPTIEAVVGSDGKTRTVSATKLTKANSAELEGSGGSPKKKRKV

SEQ ID NO: 587 - protein, 1104 aa, Artificial Sequence
  Description of Artificial Sequence: Synthetic polypeptide
  Category: cytosine base editor
  Description: rAPOBEC1-nMG34-1 (D10A)-UGI (PBS1)
MGSSHHHHHHMSSETGPVAVDPTLRRRIEPHEFEVFFDPRELRKETCLLYEINWGGRHSIWRHTSQNTNKHVEVNFIEKFTTERYFCPNTRCSITWFLSWSPCGECSRAITEFLSRYPHVTLFIYIARLYHHADPRNRQGLRDLISSGVTIQIMTEQESGYCWRNFVNYSPSNEAHWPRYPHLWVRLYVLELYCIILGLPPCLNILRRKQPQLTFFTIALQSCHYQRLPPHILWATGLKSGSETPGTSESATPESAMERELVLGIAYGGKYTGLAVVDRRHNQVLYANRLKMRDDVAGILKDRRKQRGIRRTAQTKKKRLRELKNYLKSIGYNESTATFETVYSLAHKRGYDYADMPEEKTSEEIEAMDVEERKQWEKEKQEWEETKRNSRHRKEVVKDVHKAMIEGRATEEQIKRVERIFNKQYRPKRFNNRILTKCKVEDCGVNTPLRKNVRDLLIENIVRFFPIEQSEKDNLKDAVLDKNRREEVKSFFRKHKTDEHIRKQVYDIADNKLSGRTVFCKEHILEHTEHSKEERKVFRLAPSLKTKIENVLAVIKDEILPKFTVNKVVMESNNFDIAAKTQGKKRLAKEEYGKGPREGKETRKEALLRETDGRCIYCGKSIDISNAHDDHIFPRKAGGLNIFANLVACCAVCNENKKGRTPLESGISPKPEIIAFMKNDLKKKILEDARNINTVDFNKYMSHASIGWRYMRDRLRESAGNKKLPIERQSGIYTAYFRRWWGFKKERGNTLHHALDAVILASRKGYSDDGLVDMTLKPKYNKGGEFDPEKHLPEPIEFKMDKGSRGSALHDRNPLSYKKGIITRRFMVTEIECGKEDDVISETYREKLKEAFKRFDTKKGKCLTDKEAKEAGFCIKKNELVMSLKCSIKGTGPGQMIRINNNVFKTNVHNVGVDVYLDEKGKKKAYERKNPRLSKHFIEPPPQPNGRVSFTLKRRDMVTVEGEDAIYRIKKLGTSPTIEAVVGSDGKTRTVSATKLTKANSAELEGSGGSTNLSDIIEKETGKQLVIQESILMLPEEVEEVIGNKPESDILVHTAYDESTDENVMLLTSDAPEYKPWALVIQDSNGENKIKMLSGGSPKKKRKV

SEQ ID NO: 588 - protein, 1592 aa, Artificial Sequence
  Description of Artificial Sequence: Synthetic polypeptide
  Category: adenine base editor
  Description: MG68-3-nSpCas9 (D10A)
MGSSHHHHHHMNEQTSTDEQFMQQALALADEAERQGEVPVGALLVHQGTVIGRGFNQVITQLDPSAHAEMLAIRDAARYLQNYRILDTTLYVTLEPCPMCAGALVHARVKRLVYGASDPRTGACGSVFNVVADTRLNHQLEVVAGVLGSQCGERLSAFFRQRRAAQKALKKAAQNFQSPSSGGSSGGSSGSETPGTSESATPESSGGSSGGSMDKKYSIGLAIGTNSVGWAVITDEYKVPSKKFKVLGNTDRHSIKKNLIGALLFDSGETAEATRLKRTARRRYTRRKNRICYLQEIFSNEMAKVDDSFFHRLEESFLVEEDKKHERHPIFGNIVDEVAYHEKYPTIYHLRKKLVDSTDKADLRLIYLALAHMIKFRGHFLIEGDLNPDNSDVDKLFIQLVQTYNQLFEENPINASGVDAKAILSARLSKSRRLENLIAQLPGEKKNGLFGNLIALSLGLTPNFKSNFDLAEDAKLQLSKDTYDDDLDNLLAQIGDQYADLFLAAKNLSDAILLSDILRVNTEITKAPLSASMIKRYDEHHQDLTLLKALVRQQLPEKYKEIFFDQSKNGYAGYIDGGASQEEFYKFIKPILEKMDGTEELLVKLNREDLLRKQRTFDNGSIPHQIHLGELHAILRRQEDFYPFLKDNREKIEKILTFRIPYYVGPLARGNSRFAWMTRKSEETITPWNFEEVVDKGASAQSFIERMTNFDKNLPNEKVLPKHSLLYEYFTVYNELTKVKYVTEGMRKPAFLSGEQKKAIVDLLFKTNRKVTVKQLKEDYFKKIECFDSVEISGVEDRFNASLGTYHDLLKIIKDKDFLDNEENEDILEDIVLTLTLFEDREMIEERLKTYAHLFDDKVMKQLKRRRYTGWGRLSRKLINGIRDKQSGKTILDFLKSDGFANRNFMQLIHDDSLTFKEDIQKAQVSGQGDSLHEHIANLAGSPAIKKGILQTVKVVDELVKVMGRHKPENIVIEMARENQTTQKGQKNSRERMKRIEEGIKELGSQILKEHPVENTQLQNEKLYLYYLQNGRDMYVDQELDINRLSDYDVDHIVPQSFLKDDSIDNKVLTRSDKNRGKSDNVPSEEVVKKMKNYWRQLLNAKLITQRKFDNLTKAERGGLSELDKAGFIKRQLVETRQITKHVAQILDSRMNTKYDENDKLIREVKVITLKSKLVSDFRKDFQFYKVREINNYHHAHDAYLNAVVGTALIKKYPKLESEFVYGDYKVYDVRKMIAKSEQEIGKATAKYFFYSNIMNFFKTEITLANGEIRKRPLIETNGETGEIVWDKGRDFATVRKVLSMPQVNIVKKTEVQTGGFSKESILPKRNSDKLIARKKDWDPKKYGGFDSPTVAYSVLVVAKVEKGKSKKLKSVKELLGITIMERSSFEKNPIDFLEAKGYKEVKKDLIIKLPKYSLFELENGRKRMLASAGELQKGNELALPSKYVNFLYLASHYEKLKGSPEDNEQKQLFVEQHKHYLDEIIEQISEFSKRVILADANLDKVLSAYNKHRDKPIREQAENIIHLFTLTNLGAPAAFKYFDTTIDRKRYTSTKEVLDATLIHQSITGLYETRIDLSQLGGDGSGGSPKKKRKV

SEQ ID NO: 589 - protein, 1588 aa, Artificial Sequence
  Description of Artificial Sequence: Synthetic polypeptide
  Category: adenine base editor
  Description: MG68-8-nSpCas9 (D10A)
MGSSHHHHHHMPQSEQDIYWIRYAMQLAERAEQAGEVPVGAVLVLDNQALGEGWNLSISRHDPCAHAEIMAIRQAGERIGNYRLLGATLYVTLEPCVMCAGAMVHSRIARVVYGASDLKTGAAGSVFDVLSDPRHNHVVEITGGVESEACSQQLSDFFRRRRAEQKAEKQRLKDNQSGGSSGGSSGSETPGTSESATPESSGGSSGGSMDKKYSIGLAIGTNSVGWAVITDEYKVPSKKFKVLGNTDRHSIKKNLIGALLFDSGETAEATRLKRTARRRYTRRKNRICYLQEIFSNEMAKVDDSFFHRLEESFLVEEDKKHERHPIFGNIVDEVAYHEKYPTIYHLRKKLVDSTDKADLRLIYLALAHMIKFRGHFLIEGDLNPDNSDVDKLFIQLVQTYNQLFEENPINASGVDAKAILSARLSKSRRLENLIAQLPGEKKNGLFGNLIALSLGLTPNFKSNFDLAEDAKLQLSKDTYDDDLDNLLAQIGDQYADLFLAAKNLSDAILLSDILRVNTEITKAPLSASMIKRYDEHHQDLTLLKALVRQQLPEKYKEIFFDQSKNGYAGYIDGGASQEEFYKFIKPILEKMDGTEELLVKLNREDLLRKQRTFDNGSIPHQIHLGELHAILRRQEDFYPFLKDNREKIEKILTFRIPYYVGPLARGNSRFAWMTRKSEETITPWNFEEVVDKGASAQSFIERMTNFDKNLPNEKVLPKHSLLYEYFTVYNELTKVKYVTEGMRKPAFLSGEQKKAIVDLLFKTNRKVTVKQLKEDYFKKIECFDSVEISGVEDRFNASLGTYHDLLKIIKDKDFLDNEENEDILEDIVLTLTLFEDREMIEERLKTYAHLFDDKVMKQLKRRRYTGWGRLSRKLINGIRDKQSGKTILDFLKSDGFANRNFMQLIHDDSLTFKEDIQKAQVSGQGDSLHEHIANLAGSPAIKKGILQTVKVVDELVKVMGRHKPENIVIEMARENQTTQKGQKNSRERMKRIEEGIKELGSQILKEHPVENTQLQNEKLYLYYLQNGRDMYVDQELDINRLSDYDVDHIVPQSFLKDDSIDNKVLTRSDKNRGKSDNVPSEEVVKKMKNYWRQLLNAKLITQRKFDNLTKAERGGLSELDKAGFIKRQLVETRQITKHVAQILDSRMNTKYDENDKLIREVKVITLKSKLVSDFRKDFQFYKVREINNYHHAHDAYLNAVVGTALIKKYPKLESEFVYGDYKVYDVRKMIAKSEQEIGKATAKYFFYSNIMNFFKTEITLANGEIRKRPLIETNGETGEIVWDKGRDFATVRKVLSMPQVNIVKKTEVQTGGFSKESILPKRNSDKLIARKKDWDPKKYGGFDSPTVAYSVLVVAKVEKGKSKKLKSVKELLGITIMERSSFEKNPIDFLEAKGYKEVKKDLIIKLPKYSLFELENGRKRMLASAGELQKGNELALPSKYVNFLYLASHYEKLKGSPEDNEQKQLFVEQHKHYLDEIIEQISEFSKRVILADANLDKVLSAYNKHRDKPIREQAENIIHLFTLTNLGAPAAFKYFDTTIDRKRYTSTKEVLDATLIHQSITGLYETRIDLSQLGGDGSGGSPKKKRKV

SEQ ID NO: 590 - protein, 16 aa, Artificial Sequence
  Description of Artificial Sequence: Synthetic peptide
  Category: Linker
SGSETPGTSESATPES

SEQ ID NO: 591 - protein, 17 aa, Artificial Sequence
  Description of Artificial Sequence: Synthetic peptide
  Category: Linker
SGSETPGTSESATPESA

SEQ ID NO: 592 - protein, 32 aa, Artificial Sequence
  Description of Artificial Sequence: Synthetic peptide
  Category: Linker
SGGSSGGSSGSETPGTSESATPESSGGSSGGS

SEQ ID NO: 593 - protein, 34 aa, Artificial Sequence
  Description of Artificial Sequence: Synthetic peptide
  Category: Linker
GTSGGSSGGSSGSETPGTSESATPESSGGSSGGS
